United States Patent Application Publication US 2025/0320452 A1 - sequence listing, part 8

SEQ ID NO: 6 - DNA, 3977488 bp, synthetic construct (residues 1,988,745-3,977,488 of 3,977,488)
  source 1..3977488: mol_type = other DNA; note = Synthetic E.coli genome
ccgccgtaatggtctgggtgatttggggcgtgatcgttaatgcctggtttattccagaaattgccagccagttcttcaccatgggtctggtgattggcatcatcggcgttgttttccgccttaacggcatgacggttaataccatggctagttcctttaccgaaggggcgcgaatgatgatcgcccctgccctgctggtgggtttcgccaaagggattttgctgctggtcggtaatggtgaagcgggtgatgccagcgtgttaaataccatcctcaacagcattgccaatgccattagcggtctggacaacgcggtcgcggcctggtttatgttgctcttccaggcggtatttaatttcttcgtgacgtccggttctggtcaggcggcgttaaccatgccgttactggcaccgcttggcgatctggtcggtgttaaccgtcaggttaccgtgctggcgttccagtttggtgatggcttcagtcacatcatttacccaaccagtgcgagcttaatggcaacgctcggtgtgtgcagggtggacttccgtaactggctgaaggtgggcgcgaccctacttggactgctgtttattatgtccagcgtcgtagtgatcggcgctcagttgatgggctaccactaaaaatgttaagagccgcaattgcggctcttttttcattctgccgtttcagtctctacggcttcatttttggcattgcgcttcatccacaacgctagcgctttcaggctgtctggagtgaactcatcgcagcgtgcggtgatttcttccggcgtcagccagcaaacttcactgacttcatcttcctgtagtgcgaagggaccgtgagagacgcagctgaacaatgcgccccagacacggcaatttttatcttcgaaatagaactgcccgtgctcggcaaaggggacaccggcaatgcccaactcttcttccgcttcgcgacgcgcggattccagcagttgctcatcggcctggactacaccgcctgcggtcgcatctaacatgccgggtaaaaagtcttttgtctcggtacgacgctggaccagaattttgcccatgccatcatgcacgacgatgtaagttgcacgatgacgcagacactgtgcccgcatttgttcccggctggcttgtgcaatgacttcgttctcttcattgacaatatccacccattcagtacttgccaaacgacgctgttccattatcaggaaaccttctttttctggcgctcttacggcgcattttgagttgtgggtaaattacggattaatcgcgacctgcgcaatgatactttgatcattgagtgcgattacactaagtacgtcattatccagcatgccataactcgccggattaccgcctttcggaatactcacgctgccggggttgaagtggaaaatctccccccgctgttctgccactggcagatgggtatgaccgtacaccagcacatcgttctggtttaaagcaggcagattttccgggccaaaaagatgaccatgcgtcaaaaacagacgttgtttttccagtaatacctgttgccacggcgcggttatcgggaaatgcagcagcatttgatccacttcgctgtcgcagttgccgcgcacagcgataaccttatgtgccacttcattaagccgttcagcgactttggctggcgcgtaaccctccggtaaagcattacgcgggccgtgattcaacacgtcgccaaggatcaccagccactgggcaccgctttgggcaaacaactccagaacacgttccgtcgccggtaagctcccatgaatgtcgcttgcaaacatcagtttcatcactcactcctcgtcgaaaaaacgtaagctatgatactggattctgtcgttgctatcagccagattgcttcgcgctaagtgcaataaaacgctggacagacgctcgctgccactggaatgttgcataatccaccaggcgttctggcacctcatcgccatgtagtaccaggcggttaatcattagcgccagatcagtatcagcaatgcaccattcaccaaataaattcggctgacccagtactaacaaatgttctgccatcgcgaacagtttctctgcactggcttttccctcggccgttagtggcgcttttttcgcccccgcaaagacaacatccgtcggacgctcttcgcggatgggcatcagatcgctgcgcagccaggcctgaatctgtcgtgcacgcgcacgattttctaaatcaagcggataaatacgttcccaggtcggtgacgcaaatcgatcttccagatactccgcaatggcagaagattcactcaactcaaaatcatcgatttgtaataacggcacacggcgtgtctgaccgtaaccttgccacgtcggctgcaaatgttcaccgctgtcgaggtcgatggtcttgatatgaaagctcaggcctttttcctgcaacgccacccaggcggataacacataaggggagaaaaagtgggcatcactccaaagcgtgatagcgggtttactcattatgtcctcggcaataaagggggctggctatcaaactatagagcctttttgtcactgtcacgtgacgaatactcacgtaagtcgccgcgctttctatacttgtggtgttcagatgattaaacaaccggagctgcaatgatcgatctctatttcgccccgacacccaatggtcacaaaattacgctgtttctcgaagaagcagagctggattatcgcttgattaaggtagacctggggaaaggcggtcagtttcgtccggaatttttgcgcattagccccaacaacaaaattccggcaattgttgatcattctcctgccgatggcggcgaaccgctaagcctctttgagtctggtgccattttgttgtatctggctgagaaaacaggactctttttgagtcatgaaacgcgtgagcgcgccgccacattacagtggttattctggcaggtaggcggactggggccgatgcttgggcaaaatcatcattttaatcacgcagccccccaaaccattccttacgctattgaacgttatcaggttgaaactcagcgtctttaccatgtactgaacaagcggctggaaaacagcccctggctgggaggcgagaactacagcattgcggatattgcctgctggccgtgggttaatgcctggactcgccagcgaattgacctagcaatgtatccggcagtcaagaactggcatgagcggatccgtagccgccctgccaccgggcaggcactgctaaaagcacaactcggtgatgagcgtagcgatagttaacagaaacaggttctcgtgtattatttcatcctaagtaaaacaacggagaacctgcaatggcacaacctgccgctattattcgtataaagaaccttcgtttgcgtacgtttatcggaattaaggaagaagaaattaacaaccgtcaggatattgttatcaatgtgacgatccactaccccgccgataaagcgcgcactagcgaagatatcaacgatgcgctgaattatcgcaccgtaacgaaaaacattattcagcatgtagagaataaccgtttctctttgctggaaaaattaactcaggatgtgctcgatatcgcacgtgaacatcactgggtgacgtatgctgaagtggagatcgataaactgcacgcgctgcgctacgccgatagcgtatccatgaccttaagctggcagcgttaatcgccatatcgggaggctgcatgaacatagtgatcaccggagggacaggattaattggtcgccatttgattccgcgtttgctggagctgggccatcaaattacggtagtgacgcgtaacccgcagaaagccagttccgttctcggccctcgggtgacactatggcaagggcttgccgatcaaagcaacctcaacggcgttgatgcggtaatcaacctggccggagaaccgattgctgataaacgctggactcacgagcaaaaagagcgtctctgccaaagccgctggaatatcacgcaaaaactggtcgatttgattaatgccagcgacacgccaccgagcgtactcatttccggcagcgcaacgggctattatggtgacttaggtgaagtggtggttaccgaagaggaaccgccgcataacgaatttacccataaactctgcgctcgctgggaagaaattgcctgccgggcgcaaagtgacaaaacgcgagtgtgcctgctgcgtaccggtgtagtgctggcaccggatggcggtattctcggtaaaatgctgccgccgtttcgtcttggcctgggcgggccgattggctctggtcggcagtatctggcctggattcatattgatgatatggtcaacggtattctctggctgctggataacgagctgcgcgggccatttaatatggttagcccctacccggtacgcaatgaacaatttgcccatgcgctcggtcatgcgctgcatcgcccggccattttgcgcgtccccgcgaccgccattcgactgttaatgggcgaatctagtgtactggtattaggtggacaacgcgcgctgcctaaacggctggaagaagcgggttttgcgtttcgctggtacgatttagaagaggcgctggcggatgtcgttcgctgatgtggtttacagcaaacatccgccagttaactcccggtgttacaggattagtggctttgcgcgataagatcgtctggactaagtcgggtcaccatcataactaactctctgtctaaacctctatccagcatctcctgagcaatacgcagggcttcttcgtgtttgccctgcattgcgccttcttcacgtaatctgtcagcaatggtcatcagtttctccttttcttgtggtgcgcgttccgctatctcaccaataaatgcacgaaaacgctgggcatcccctgtttgtaatacgtaattaaacagggcttttagctgtctgtcattagtgttccctgtaactagcaggctaacaatttggtcgactaatcccaacagatcgcgctgacgaatatgtttctgaattaactccaacagcgccattttgcggtgttgcataatctcgtcatccggcaccacggtaatatccaccaacggaaaagcgctactatatattttgcgggctatagcaggctcggcaaattcatcaagccagcagagactataaggataaggacttctgcaaccatgataaaacagcatcgggagcaccaatggaagctctttatagcccgcatcaagatggttttgcattgccgcaatggaataacgcatcatgcgaaaagccattaattcttccggcttactttggtgctctatcactacataaatataacccactccctcctgcgttttcacagaccacaagaggtcggaataatattgccgcaggtcttcatcaataaaactgtttggttccagtttaagcgtcgttaaatcacacagtttgcgcagcggcgcgggaagatgaatatcaataaaatcccgcgcggtgtctggatggcgtaaaaaagatttaaataccgcatcatgcggcgtggaagttgtgcttattgtcatggcgttccgtcacccctcaaatttaagatgacgcgacaataaccacgattaacacccaatgcagcaggcagtttttatctttggacagcgaattcagaagtatttttagcggactgtaacttttacatttcagcggaagctgactcgcaaattccccatgaaaatactccggcagcgttagccaccggagaggaaattatttcaggcttcccttaaggaaccgttgcagacgagggctttgcgggttgccaaataactgctccggcgcgccctcttcttctattttcccctgatggaggaaaatgacatgagtagaaacatggcgagcaaagcccatttcgtgagtcactaccaccatggttttcccctcttctgccagttgctgcataatacgcaacacttcgcctaccagttcaggatcgagcgcgctggtaggttcatcaaacagtaaaacttccggttccatcgccagcgcccgcgcgatagaaacacgctgttgctgaccgccggaaagatgcaccggatatttcccctgcgcacgttcgtctatcccgacttttgccagatacttcaccgcccgctcgcgcgcttcctgcttgctcaggcccaacacctgaatcggcgcttccatgacgttttccagcaccgtcatatggctccagagattgaagtgctggaataccatcgtcaggcgtgtgcgcagtaagcgcagttgatttttatcggcgactttgagttgaccgtctttgtcgcgcaccagattgatcgtctggccattgaccacgatgctcccttcactcggtttttcgaggaagttaatgcagcgcagaaaggtacttttcccgcttccgctgcttccgatgatgcttattacatctccggcattcgcttgcagacttacccctttcagcacttcatgttcgccgtagcgtttgtgcaaatcgataacgtttaatttattctcggacatcgtattctcagtgcgtactagaaggtttcacatgctgcaaccagcgtttttccgctctgcgaaagaggctgatcaggacataagagatgattaaatagagcaccgcggcaatgccgaaggcggtaaaaggttgatacgtggcggcgttaatatcgcgggctattttcagcagatccggcaccgtggcagtaaatgccaacgcagtagagtgcagcatcaggatcacttcgttgctgtatgccggtaacgcaatacgcagcgcagaaggcaaaataatgcagcgatacattttaaaagtgctgaagccataggctctggcggcttcaatttccccatgcggaacgctacggattgccccagcaaaaatctcggtagtgtaagcgcaggtgttaagcgtcagcgccagcacggtacagttcaggccactgcggaagaaagcgttaaggaattcggttcccttaacaatctcaagcgtgtacatgccggaatagaacaccagcaactgaacatacagcggcgtaccgcgaaaaatataggtaaataaccagattggaaactggatgtatttattactggagacacgaccaatcgccagaaacagcgccaggactccgcctatcactacgctcaaaataagcagccacagagtgatcgccacaccagtaaagcgataaccgtcggtccacagcagcggtttccagtattcatgtaagatttcgatcacaggtcagccctcttcacacccacggagtagcggcgctcaaggaacagcagcacaccattggaaacagtggtgaaaaccaggtaaatcacgccacagacgatggcgaaatagaacggttcccaggtacttttgcctgccagttgggtggctttgaccacatcttccaggccgagtaagctaaccagtgcggtagatttgaggatcacctgccagttgttgccaatgcctggcagggcgtaacgcatcatgctcggaaacatgatccgccgaaacacttgcccacgagtaaaaccgaacgccgtcgccgcctctatatgtcctttcggcactgccataaaagcaccacggaacgtttcggtaaaataagcaccgtagataaaaccgagagtgataataccagcgaccatcggatcgatatcaatctgcccgacgcccatcgcctccgtcaccgtgtttagcgcaatctgcaaaccgtagaaaatcagcagcatcaacactaagtccggcacgccacgaatcagcgtggtgtacccttcgaaaatcagcccgctaagccgattttggctgagcttaccgccagcgccaattaaaccgatgattacagcgagcactacagagctgatagccagctccagcgtgacgagcgcaccctgtaaaataacaccactaaacccatacaacatgctgcctgtcctgtcgtgtgtggtgaattaccgcctcttgtctccctccggttacccgaagggagcgggctttctttcaccgatggcgattagccaccataaacatcaaaatcgaagtactttttcgctaatttctcgtaagtaccgtcagcgcgcatttcggcaaaggctttgttcagtgcttcgcgcagttcgttatcttctttacgcaggcccatgccggtccctacgccaaacagtttttcatctttaacagacgggccaccgaatttgtaatctttaccgacaggttgtttgaggaaaccttcgctggcagcgacctcatcctggaacgcggcatcaatacgtccggcagtcaggtcagaataaatgttgtcctgcccctgatagctgacgatttcaatgccttttggtgcccaatgttcattaccgaacgtctcctgggtggtgccctgcaatacgcctacccgtttgcctttcaggctctcgactgtcggctgaatgtcagaatttttcgccaccaccaaacgagaatcggcagcgtacagtttgtcggtgaaggctatttcttgctgacgtttttccgtaatggaaaggctactcatgatggcgtcaatcttcttcgcttttaaggacgggattaacgcatccagcggattttcgacaaacgtacattgcgtattgatgcgtttgcataattcctttgccagatcgatatcgaagccaaccagttcgccttgactatttttactttcaaatggcgcataggtcgggtcggtaccgatgcggatgttttgcggaatcgcagcaaacgccgcagttgcgctggagaaggccagaaccagagagaggcttagcaccagttttttcataatgtcctcaactgacagtctttttatagggaatatttacaggtttgttacacttatcgtgccataaaattgaccatcaaggcaaaatatcccgccccgttagacgtattatttttcattaaaaatgcttaagtatgcatttcaatgcaccacgatagtgcaacaaacctggcgtgcaccatgatgatcattccatcaggtacagcttcccagcgacgtatcagtcaccgtagacattaaagtcgaaatactttttcgccatcttgtcgtaggtgccgtcctgacgcagctcgccaagcgccttattgaaggcagccgtcagttcagcatcatctttacgtagccctacaccggtgccatcaccgaagtattttttgtcttttacactactgccagcaaaggcgaaatctttaccagcaggttgcttgaggaatccttcgctggcagcaacttcatcttgtaacgcagcatccagacgtcctgcagccagatcggaatagaccaaatcctggttggcataggccaccacatccacgcctttactacgccaggtctcgttagcgtaagcttcctgggtacttccctgcagcacaccaacatgtttacctttcagactatccagcgttggctgaatcggactacctttggccgcaatcaaacgagaatctgcggcgtacagcttgtcggagaaggcaatctcctgctgacgtttatcggtaatggaaaggctgctaataatagcgtcgatttttttcgctttcagactggggatcagcgcgtcaaagtcactggcaacccaggtacatttcacctgcatccgtttgcacatctcgttaccgagatcgatatcaaagccaacaaaatcacctttagcatctttgctactgaacggtgcgtaggtggtatcggttccgatacgtaccgtctccggtagcgccgcatagctggaagccgctgtggagagaccgactaacaaagacagagcgagaatgctcttcttcatacataaccctcaagtgaaaatggcttttttatgttgtgtattgtgttgtgtgtttgcaggctctttcatgcaggtcttatgccatcttgacgacaacagtaacattcaacgttaaatatgttaataagacgttgcattattgtcctgaagttgaagatagcaggtatagcggttgaatcgcagcgtttcgattgaatggcagaaacaaaatgtcgaggatttgatcgcggttgcaaaattgccctgaaacagggcaacagcggagttatgcgccctgccagcgggcaaagagatcttcaggaagggttatcgcaaactggtcaagaacacgattaaccgtctgatttatcacatcatcaagggattgcgggcgatgataaaacgccggaacgggaggcataatcaccgcaccgatttctgccgcctgagtcattaaacgcagatggcctaagtgcaatggtgtttcacgcacgcagagcaccaacgggcgacgctctttcagcaccacatctgccgcacgggtcagtaagccatcagtatagctatggacaatgccggaaagggttttgatactacagggtaaaatcaccatccccagcgtctggaaagaaccggaagagatgctggcggcaatatcgcgcgcatcgtgcgtgacatcggctaatgcctgcacttcgcgcagagaaaaatccgtttcgagggataaggtctggcgcgctgcctggctcatcaccagatgcgtttcgatatctgtgacatcgcgcagaacctgtaataagcgcacgccataaatcgcgccgctggcaccgctgatgcctacaatgagtcgtttcataaatagttgccctgtcagacttgcaggcagactttgcaggatttcggcgggagttgcaagtcagggtgccagaccggcaccctcagcgaaggcatcatccttcgttatgcatttcgagattttccacttcgttctgacgttgcactgctttggcgtcatcattacgtaacgtatcgaggaaatcgaggtagccctgatcaacatctttggtgacgtagacgccgttgaacacgctgcattcaaactgctggatatccggattttcagcgcgaacggcgtcgatcagatcgttcagatcctggaaaatcaacccgtcagcaccgatgatctggcgaatttcatcaacttcgcgaccgtgagcgatcagttccgtggcgctcggcatatcaataccataaacgttcgggaagcgaatttccggtgccgcagaagcgaggtacactttcttcgctccggcttcgcgtgccatctcgataatctgctcagaagtggtgccacggacgatggagtcgtcgaccagcaggacgtttttatcgcggaactcggcgcggttggcattcagtttacggcgcacggacttacgacgcagctgctggcccggcatgataaaggtgcggccaacatagcggtttttaacgaagccctggcggtacggtttgcccagaatacgagcaatttccagcgcgatatcacagctggtttctgggatcgggatcaccacgtcgatatccagatcttcccattcgcgggcaattttctcgcccagtttcgtgcccatattcacacgcgcgctgtaaacggaaattttgtcgataaagctgtccgggcgggcaaagtatacatactcaaacaggcacggattgctgaccggattgtcagcacattgacgggtaaacaactgcccttcttcagtgatgtaaatcgcttcgcccggcgcgacgtcacgcaggaaatcaaagcccagcgtatcgagcgctacgctttcggaagcgaccatatattctgtacggttctcgtcaatatcacgttttcccagtaccagcggacgaatcccgtttggatcgcggaaagcaaccataccgtggccgataatcatcgccacacaggcatacgcgccgcggattaagcggtttgtggcagcaatggcagcgaaaatattgtcggcttccagcgggtagtggcggaagttgtccagctcgctggcgaagatattaagcagaatttcgctgtcggaagtggtgttgatgtggcggcgtttttcttcaaacagttttttacgcaactcgtgagcgttggtcagattgccgttgtgggcaagcgtaatgccatacggggagttaacgtaaaacggctgcgcttcagaggcgctggagctgccagccgtggggtaacgcacatgaccaatgcccatattgccctgcaaacgctgcatatggcgagcttcaaatacatcgctcaccagcccgttcgctttacgcaaacggaagcagttattggcatctatggtgatgatgccggcggcatcctgaccgcgatgctgaagcaccgttaaggcatcataaatgctctggttaaccggcataacaccggcgataccgacaataccgcacatacgtctttttcctcgttaagccacatctcagagcacttacgctctgggcaagaaactactgctgctttgcagataatcaaaaaaacatctgatgataaaactgaattgcgggatcagctgacttttgctccagtcttcgcttttgctcaccccggtaaaggagtcgagaaagaagagaatggcagcaacaatcaacacaccgcgcaacgcaccgaaacagacgcccagcacccgatcggtgccactcaaccccgttttctccaccaactggcctatcacgaagttcacgatagcaccaacgatcagggtagcgataaacagtaccgcgatggcaatcccatttcgaaccagttcgtcttcaaagcccgtaaaccagacactcaggtaagtgtagtaatgactggcaacaaagaaagcacaaccccatgtcaccaggcttaacgcttcacgaacaaagccgcggatcaggctaaccagagaggaaaaagcaatcaccgcgattatggcgtaatcaatccagaccatatgtgtcccacgattttacgccctgtcatcctgttcggggcgcattctaacagaaaaagaaaacgtttgcgtagggatttccttcccgcgcatcaataaaaatggcgctgaaaaaatattcaacgccatcgactttttatgcctttgcggcatcgggcaatgcgtgtcggatgcggcgtaaacgccttatccgacctacggttctacccctgcgtaggcctgataagacgcgccagcgtcgcatcaggcaagaccgtattaattcggcgtatagcccattaccacgccacttaagccagaaagttgcttcaactcacccaggctacctttcagcttatctttgctggcatccggcccaaccagaatacgggtaattttaccctgcactggcgtggatgggctcgtataaacccgataaccggcaccgcgcagcttaccgacaatctcattcactttatcggcatttttcagcgcacccagttgcacaacataggctttacccgtcggtgcagctttttcttccacgaccggcttcggttctggcttcggcgcaggtggtgcttcaacctttggtttaggcggctccaccggtttcggcttcggtggggcgaccggtgcaggttccggttcaaactcggtgttattggctgcaatagtggccggatcgaggctcggtgctgcggcatcacctgcccgcacctcttccgctgcgccttccggcggctgcgtcggtaacgcctgggtggcggctggcatcatatcaggctcatcacgatcgcccgctttcggcaccagcgggatagccgcgaactcatcctgataatgttttttctgcccgtccagcagccctggaagtacaatcacccccagcgccaccagcacgatcgtgcccactaaccgattctgaaacttacttgccaccgcttctcctcgcgtcaatcacttccatgacatgtgcgaccgtgtggaaagaaccacacaccagcacggtgtcttccgctttagcgtccgccattgcggcatcccatgcctgcgcaacgctatcaaaacttttgccgttacccaaatgctcaagcagttgttctgccgtggcaccgcgcggcccttccagtggcgcacaataccagtcatcaaccacgcttttcaaccaggccagagttccggcaatatctttatcatgtagcataccgataaccgccagcacgcgcccgtttttcggtagcgctttcatacgcccggtgagatattccgccgcatgtggattatgcgcgacatcaaaaataacgcgtgggctctcgctcacaatctggaaacgtcccggcaaaattgcgctggcaatcccgtcgcgaatggcattttcactgacttccagcccgctggcacgcagtgccgccagcgctgttgcggcattcggttgcgggacaagcggcaacggcagattttccagcgtgccgtgagcatcgctaaacgcccagtcatgatcggtgacggaatagttccactcaacgccccgacgttgtaacagtgcacctttttcctgcgccacatcagcaatggtagaaggcatttccggctcaccgacaattgccggtttttcgctgcggaagatgcctgctttctcgcgaccaatactttcgcgatctggacccagccagtcggtatgatccagcgcaatactggttactaccgcgacatcggcgtcgacaatattggttgcgtccagacgaccgcccagccctacttccagaatcaccacgtcaagttgtgcctgcttgaacagccacaacgcgctcagcgtaccgtactcgaaataggtcagggaaatatcaccgcgtgcgctttcaatctccgcaaaagaggcggtgtgggcgctttccggcaattcctggccctgcacacgtacgcgctcggtataacgcaccagatgagggctactgtagacgcccactttgtaccctgccgccatcagaatgctctccagcgtacggcaggtggtgcctttgccattcgtacccgcaacggtaaacacaaatggcgctggtttcaggacgccaagacgcgccgcgaccaggctcacgcgctcaaggccgagatcgatagttttactgtgcaggttttccagataagaaagccagctagccagagggctcgcggcttgaggagtgcgtttgataatcatggtatccgctgattcgttacggtgagaatagcaaaagggcagagccagtggccctgcccttatcagttatcaggcctcaggttcctgatccggtaccgggggtaccactacgccttcacgcggcgcttcaggattcggcgctggcagattcatcaacttcgccagaatgctcgccagtttcaggcgcatttccggacgacggacgatcatgtcgatcgcgcctttctcgatcaggaattcactgcgctggaatccaggcggcagtttttcgcgaacggtctgttcgataacacgcggaccggcaaagccgattaacgctttcggttcagcgatgttgagatcgcccagcatggcgaaacttgcagaaacaccgcccatcgtcgggtcggtcagcacggagatgtacggcaagccgcgctcctgcatttttgccagtgccgcagaggttttcgccatctgcatcaggctcatcagtgcttcctgcatacgtgcgccaccagaggcggagaagcagatcagcgggcagttatcttccagcgcctgctcaacggcacgcacgaaacgtgcacccacaacagaccccatactaccgcccataaaggcgaactcgaatgccgcagcgacaaccggcattccatacagagtgcctttcatcaccaccagcgcatctttttcgccggtttctttctgcgcagatgccagacggtctttatacttcttggagtcacgaaacttcagcacatctttcggctcaagctcgctacccagctccacaaggcttccttcatctaacaggctatgcaggcgattacgcgctgtcatacgcatgtgatggtcacacttcggacagacctcaagattacgttccagctcagcgcggtataaaacctgaccgcagctatcacacttagtccacaccccttcaggaatgctcgccttgcgggtgggagtaatgttgcttttaattcgttcaatccagctcattagggacctttctgtctgaacctggttcgatgccagttttatctttggggacgcataatgccatttttgcccccaacagaccatgaatgttgcacattaaaacataacagcccgaaactttggataaaaaagtggtcgaaccgcggagttactttttattttgcggcgcgtgccgcagcgcgtttgtgacggattatttcgatgacgcccggcaaaatagaaaccacaataatcccgacgatcagcagcttaaggttatcctgaaccatcgggattgtaccgaagaaatagcctgcgtaggtaaaaagcagtacccacaacagtgcgccgatcacgttataagcggcgaaatgacggtagctcatgtggcccattcccgcaacaaacggggcgaacgttctgacgatcggcacaaaacgggcgagaataatcgttttgccgccatgtttctcataaaactgatgggttttgtcgagataactgcgacggaaaattttgctattgggattactgaacaacttttcaccgaacaaccgcccgatagtgtaattgaccgcgtcacccacaatcgcggcgatcagcatcagcaccaccatcatatggacgttgagatcgttggtttccagacttgccaacgctccggcaacaaacagcaaactatcacccggtaaaaacggcgttaccaccagaccggtttcacagaacaaaattaagaacaaaatggcataaacccagacgccgtactccgcgaccagctctgccagatgcacgtcaatgtgcaggataaaatcgatgaggaaataaatcaggtccatatttgcctatgccttgtactcgtcatctttcaggctgtaactacgttggctacagcctgaaatgttccgagcattattctcgttagtccgccagaaatagcgggcccattggcggttttggaagatcataccggtcagggtaatccaccgcgaccagatacagcccttccgcttttgccgttgctgccgccagcgttctgtcctttgccgccagcaactctgctatccagctctccggctggttgtgggcaccgacttccatcaggctgccgacaatattcctgaccatatgatgtacaaaagcattcgctttaatatctaccaccacataaggaccgtgacgcgtgacattaatatgcataacgttgcgccacggggttcgggactggcactgcaccgcacggaagctggtgaaatcattctcgcccagcaagcattgcgcagcccgatgcatccgttcagcgtccagcggttcgtaaaaatgggttacccctttactcagtaccgccgggcgcagccgatgattgtagatgatgtagcgataacggcgagccgtggcgctaaatcgggcatgaaaatcatcaggtacagttttaacccaacgcacagcgatgtcaccaggtaaattcgcatttacgcccaaggtccacgccgcgtctttgcgcagcgcggttgtttcgaaatgcacaacctgcccggtaccgtgtacccctgcgtcagtacgcccggcgcagaagacggtgatgggttcgttcgccacctgggagagcgccttttccagcttctcctgcacactgcggacttcgttctgccgttgccagccgtaatacttactgccgtcgtactcaatgcccagcgcaattttataaactggcggttgttgctggtcggacattagtacagatactcctgcaccagtttctcggcgatttttactgccatcagcgcgccgccaaagcgaacgttatcggccacgctccagaactggacttgctccggcataccgtagtcattacgcacgcagccaacagaaagatgcggcgtaccgctagcatcacctacctgagttgggaattcgttctcttcagagagcacaatatcttcgccttgaacaaacgcatcacgcgcttcttctgctgccagtggacgcagagcttcaaagttgaccatctgggcatgaccgtagaataccggtgcctggacgacgctagcgctaatcatcagcccttcgtcctgcaggattttgcgtacttcgtcaacgatacgacgttcttcacgcacgctaccttcgctatccggcagtaacggcagcatgttgaacgccagctgacgcccgaagaaatcttcttcgtcaatcggaatgccgttgagcaatttcgcactctgccccgctaacgcatcgaccgcttttttgccctgggcggaggcactaatcaggctggtaacgctgatacgacttaaaccgccctgatcgattaacggtttcagtgccgccagcagctggctggtcagactgtctggtacggcgatgacattccggttccggtaatctgtcagtacaaacgggtttacttccggcaccaccagcggtacgtcgggttcgagagcaaacaatccactgctgtcgatcaccaggcaaccactgttggtcgcttcttcaacccaggcagcggtagcttctttgcctgcgacaaaaaatgccagctgcgcctgcgtccagtcgaattcagcggcatcctgcacggtgattgtcttaccaccaaagcgcagttgttcgcctgcgctttcgttacgtgccagtgcataaatttccccaaccgggaactgacgttcagccagcgtttcaagcagggcttcgcccacagcgccagttgcgcccaggacggcaatgttccagccttcagacatggtggtttactccagaaatagcaaagctccctgccaatgttacagcagagagcatgaagaagagattaacgtgccggatgatgaacggcgttaaaacccagtttacacagcaaacttgccgcactggcgtcatcacaaattacatacagagaactccattcacggcgctcaagatagtttttgcgcagtttatcgaactcacccggtatcccggcgactttacgcagcggtgcgtcatcgcggcgcacatcatacaccaaatgcaccagccttttcagcgtcggttgatcgagcgggccatgcagcgtaatgcgaccaaactctggcgcaggcagtaatgtatccagcgcaacgtgctgttcatgcccaataaacttgctataagcttcaaacacttgcgtagtaccgcgtgctttaccttccagggtatagcctgcgatatggctcgtgccgatatccacttttttcagcagctcgacgttgagttccggttcgccttcccagacatccagcactacgcttaacttctggccttcattcaggcaggtcagcaacgcagtattatcgacgactgcgccacggcaggcgttaatcagaatcgctccgggcttcaggctacggatcagtttttcatccgccagatgtagcgttttgtacggaccatctttaaagagtggcgtatggaaagtcagaatatccgcgcgctggactaactcatccaggctgcggaaatcaccctcatccccacggtcggcgcgaggcggatcgcaaagtaaggttttaatccctaacgcttccagtcgcgcctgcaatcgacgtccaacgttaccaacgcccacgatccccaccgtacggtcgtacagactaaatccatcgcgttcggcaagcatcagcagggaggagaaaacatattccaccaccgcaatcgcattacagccaggtgcagcggaaaaaccaattcccgcctgcttcaaccatgcttcatcgacatggtcggtccccgcagtggcagtgccaacaaatttaatgggttttcctgccagcaaagattcattcactttcgtgacgctacgcaccatcagcgcatccgcgtctgccagttgagcgacggggattggacgcccgggaaccgcggtcacctcacccaaacggctaaataagtcgcgggcataaggcatattttcatcaacaaggattttcacgtttgtgttacctgtatgagacgagagttaaccggacaagtgtgccataatctcgcggccaggcatacttgcgaagatttcaggtataaggatacgtaatgatacaacctatttccggccctcctcctgggcaaccaccaggtcagggagataatctgccgtctggcacgggcaatcagcctttatccagtcagcaacgtactagcctggaaagcttaatgacgaaagtgaccagtctgacgcaacagcaaagagcagaactgtgggcgggtatcaggcacgatattggtctgagcggagatagtccgctgcttagccgtcacttccctgccgctgagcataatctggcgcaacgtctgctggccgcgcaaaaaagccattctgcccgccagcttttagcgcaattaggggagtatttacgtctggggaataatcgtcaggcggtcacggattatatccgtcataactttggtcagacgccgctgaatcagctcagtccggagcaattaaaaaccattctcaccctgttgcaggaagggaagatggttattccgcaaccacagcagcgcgaggcgaccgaccgtcctttattaccggcggagcacaatgcgctaaaacagctggtgaccaaacttgcggcggcaacgggggaacccagcaaacagatctggcaaagcatgctggaactttccggggtgaaagatggcgagttaattccagcgaaactgtttaaccatctggtgacctggctacaggcgcgtcagacgctaagccagcaaaatacgccgacgctggaaagtctacagatgacgctaaaacaacctttagatgccagtgaactggcggcgttaagcgcatatatccagcaaaaatatggtctttctgcgcaaagtagcctttcttctgcccaggccgaggatattcttaatcagctttatcaacggcgggttaaagggattgatccgcgtgttatgcaaccgctgcttaatccttttccaccgatgatggacacgttgcaaaatatggcaacgcgtcccgcgctgtggatactgttagtcgcgattatcctgatgctggtctggctggttcgttaaccccgacgaaaactcagtatcgtgacaataatacccagcaccgcagagatcgccccggcaagaaatacgctagagtaaccaaacgtggtcgccagcattcccgccagcggcccggagacgccgagggcgatatcctgaaacgcggcgtaaccgcccagtgcggtgccgcgaacttgactggggacgcgtttaaccacctccacgcccagcgcaggaaagataaggctacatccggctccggttaacgccgcgcccgctaatgcgacccatgcacctggggcttgccagagcagcaacaagcccaccgtttctacaagcagagagacaatcgccactttcacgccgccaaaacggtccggcatccagccaaacatgacgcgcatcacgacaaatgcgccgccaaacgcggtaagagtaaagcccgccatcgcccatcctttgctggcaaagtagaggctaacgaaagtcccgataacagcaaaaccaacgccttgtagtgccagacctaaccctggtttccagataagcccgacaacgctccacaggcttggacgttctcccgccagggccggtactttgcgcactgtgccgttacaggcccacgccagtacgggtaataccattgtggtgatcgccagtgcggcaaaaccgtaatggctatgaatcaacaggccaagcggagcaccaacagcgagggcaccgtaaatcgccattccgttccaactcatcactttgccagagtgttttggccctacgatgcctagtccccaggtcagagcgcctgtcagtaactggctttcaccaaagccaagaatcaaacgcccgacgaccaacagagcaaatttgaacggtgcggagacaggcaaaatcgccgccagcagcaacgcgccgccagccagaccacaagctaacattccctgaagcgcgctacgttttgcaccatattgatcggccagtcgcccggcgtaaccacgcgtcagcaccgtagccagaaactgaatcccgacggcaatgccgaccatggtattgccatagcccagttcatgatgaacaaacagcgggataaccggcaacggcaaccctacggtcatgtaggtgagaaaaaccgcaaaagcgatgcggaagaggctaaaattggcagaagatcgtgtttcggtttggcttacagcagtcatgcattactccagaatgcagcgcaaggcgaggagtatccccgtctcatctctctggtttcagggttacggtgcgttggcaggatttaacgcgtacgtcttttcagaaggaaatcgacaaagcgggaagtttgcctggaactggcggcgattgtcaatgatgtgaaaaagggaaccatcaggttcccttttgcgttagtgccggaggccgcattggcgcgtaacgtcggatgcgacgctggcgcgtctactccgacctactgcgaattaatctttcagcttgcgcattaccagcgtggcgttggtgccgccgaagccgaagctgttagacataacggtggtcagttcgcgatcggtcgtttcggtcacgatgttcagacccgcagcctgctcgtccagctcttcaatgttgatgctcggggcgataaagccgtgttccagcatcagcagagagtagatagcttcctgtacgccagcagcgcccagagagtgaccggtcatggctttggttgcagaaatcgccgggctcttatcgccgaacacttcacggatagctgccagctctttcacgtcgccaaccggagtgctagtaccgtgggagttcaggtaatcgattggggtatcaacgccatgcatcgccatcttcatgcagcgtactgcgccttcgccagacggagcaaccatgtctgcaccatcagaggttgcgccgtagccaacgatttcagcatagatgtgagcaccacgcgccagcgcgtgttccagctcttcaaccactaccataccgccgccgccagcgataacgaaaccgtcacggtgagcgtcgtaagtacgggaggctttttccggggtgtcgttgtatttagtagacagcgcacccattgcgtcgaattcgcaagccatttcccagcacagctcttcgccgccgccagcaaacacgatgtcctgtttgcccagttggatctgctctactgcgttaccgatacagtgtgcggaagtcgcacacgcggagctgatggagtagttaacgccatgaattttaaacggggtggcgaggcaggcagaaacgccggatgccatcgctttggtgaccacatacgggccaaccgctttcaggccgcgcgggccgcgcattgcgtcagcgccgaacacctggaaacgcggggagccgccgccggaacctgcaatcaggccaacgcgcgggttattctggtaagcttccggagagaggcccgcatcagcgattgcctgctccatagaaaggaatgcataaatggatgcgtcgctcataaagcgcacaactttgcggtcaatgaggccagtggtatccagttttacgttgccccagacgtggctacgcatgccggaatccttcagctcctgagagaaagtgatcccactacgtccttcacgcagagatgccaggacttcctgctggttattaccgatgctggaaacaatgcccaggccagtaatcactgcacgtttcattcaatacctctgtaagtcgcacatagagtaagtttcgaatgcacaatagcgtacacttgtacgccgaacaagtccgatcagccatttaatagagaaatttgcgcagccttacacacatcgctaagatcgagccaccgcctgtaagacgagtaacttacgtgaaacactactccatacaacctgccaacctcgaatttaatgctgagggtacacctgtttcccgagattttgacgatgtctatttttccaacgataacgggctggaagagacgcgttatgtttttctgggaggcaaccaattagaggtacgctttcctgagcatccacatcctctgtttgtggtagcagagagcggcttcggcaccggattaaacttcctgacgctatggcaggcatttgatcagtttcgcgaagcgcatccgcaagcgcaattacaacgcttacatttcattagttttgagaaatttcccctcacccgtgcggatttagccttagcgcatcaacactggccggaactggctccgtgggcagaacaacttcaggcgcagtggccaatgcccttgcccggttgccatcgtttattgctcgatgaaggccgcgtgacgctggatttatggtttggcgatattaacgaactgaccagccaactggacgatagcctaaatcaaaaagtagatgcctggtttctggacggctttgcgccagcgaaaaacccggatatgtggacgcaaaatctgtttaacgccatggcaaggttggcgcgtccgggcggcacgctggcgacatttacgtctgccggttttgtccgccgcggtttgcaggacgccggattcacgatgcaaaaacgtaagggctttgggcgcaaacgggaaatgctttgcggggtgatggaacagacattaccgctcccctgctccgcgccgtggtttaaccgcacgggcagcagcaaacgggaagcggcgattatcggcggtggtattgccagcgcgttgttgagcctggcgctattacggcgcggctggcaggtaacgctttattgcgcggatgaggcccccgcactgggtgcttccggcaatcgccagggggcgctgtatccgttattaagcaaacacgatgaggcgctaaaccgctttttctctaatgcgtttacttttgctcgtcggttttacgaccaattacccgttaaatttgatcatgactggtgcggcgtcacgcagttaggctgggatgagaaaagccagcataaaatcgcacagatgttgagtatggatttacccgcagaactggctgtagccgttgaggcaaatgcggttgaacaaattacgggcgttgcgacaaattgcagcggcattacttatccgcaaggtggttggctgtgcccagcagaactgacccgtaatgtgctggaactggcgcaacagcagggtttgcagatttattatcaatatcagttacagaatttatcccgtaaggatgactgttggttgttgaattttgcaggagatcagcaagcaacacacagcgtagtggtactggcgaacgggcatcaaatcagccgattcagccaaacgagcactctcccggtgtatagcgttgccgggcaggtcagccatattccgacaacgccggaattggcagagctgaagcaggtgctgtgctatgacggttatctcacgccacaaaatccggcgaatcaacatcattgtattggtgccagttatcatcgcggcagcgaagatacggcgtacagtgaggacgatcagcagcagaatcgccagcggttgattgattgtttcccgcaggcacagtgggcaaaagaggttgatgtcagtgataaagaggcgcgctgcggtgtgcgttgtgccacccgcgatcatctgccaatggtaggcaatgttcccgattatgaggcaacactcgtggaatatgcgagcttggcggagcagaaagatgaggcggtaagcgcgccggtttttgacgatctctttatgtttgcggctttaggttctcgcggtttgtgttctgccccgctgtgtgccgagattctggcggcgcagatgagcgacgaaccgattccgatggatgccagtacgctggcggcgttaaacccgaatcggttatgggtgcggaaattgttgaagggtaaagcggttaaggcggggtaatctgctctcgcagtgtttgccggatgcggcgtgaacgccttatccgacctacgtgtgacgtgtaggcctgataagacgcgataagcgtcgcatcaggcatgctgctccagacgccgcaacttactgctgactcgcctgctgaaacaggttttcccacatatcggtcaccagcgcctggtcacgcgggctcaattcaccagcaccaatggctttttccagactctggctaacggtcgtatgcaccgcctgagcggagtggtcatcaccactttccagttctgcgatggctaatgtcaggtggccacgcaaatacccactggcaaacaactcatcatcactggcatggtcaaccataccgtcgattaatgccagaatgcgactttcaaactccgcgatcatcttctttcctcattgtaaaacgtggcgctggcttcagttgagcgcttccggccacgggaactgttccgccgtaagttccggcgtgtgataataattttgtagtgctttaatgaagcgtgccggacgttccggaatgccatttgtcagataatccatcacctgcgcatgtactcgccgttgaaacaccacacgatccggttcgaaatccccttccagattgtcgcaactgacgttaaacggatatcccgccgccacacagaacaaccagtcgagcgcctgcggcttcacttcaacatcttcaaactggctttgcgtttgggcatcgcgtccgtccgggcaataccagtagccgaaatcaaccagctcacggcgcgctttcccggcaatacaccagtggctaatctcatgaattgcgctggcataaaagccatgagcaaagacgattcggttatacggtacttccgcatcagcaggaagatagatcggttcgtcgtcgcctttaatcagacgggtattaaaatcatcggcaaagcagctattaaaaatttcaatcaactgctcgtagtggtgtgtactgttcattagttcatccccaaccagtggaggatctcctgtccgtggctgtcgtaaagtaatttggcactcatcaccgcgctgacgataacaatcatcgggcggatcagcttttgtcctttgctcaacaccagtcgactacccatgcgcgcgccgaggaactgccccaccagcatgacaaagcccgtcgcccaaatcactttgccgccgagaataaacagcagtaaaccgccgatgttactcgttgcgttgagtaatttggcgtgagccgtggctttggcgaggttaaatccgcacagcgtaacgaaggccagcgcgtaaaagctcccggcagccgggccaaagaatccatcataaaaaccgacgcagccaccggctattaacgcgaagggtaaaccgtacatccggcgctggcggtcttcttcacctagctttggcatcagcaagaaatagaggccgatacaaattaccagaatgggcaaaatctgccgtaagacatcagcctgaacgtattgcaccagcagtgcgccgctcatactgccgacaaaggtcatggcgatattgagtttctgatcgcttaaactaaccactttgcggcgaataaagtagatagtagcggaaatagagccgccgcaggcttgcagtttattggttgccagcgcattagcgggagacatccccgctgccatcaatgccggaatggtgagtaacccaccgccaccggcaatgctgtcgataaatcccgccagcatggcgacaaaaaagagaactcccagcaacagcggggaaaccataaacaggctattaaacgtttccattagatcacgtgctcatccagtagcgcctggcaggaaggcggcaacggaggcggtgtcttcttctcaggctttgttgttcccggttttggaggttcaaaccagctttgcagttctgccccgcaaccatcgccacttggcggtaaaggttgatcttcacactccagactatcggcagggcaacgtaatcgtacatgcatatgcgcgcgatgctggaaccagggtcgcactttgcgcaaccagtcgcgatcggtgcccgcatcaaggcaaagttgttgtttaatcgccggattaacaaaaatgcgcgtgacgtctttgtcctgggcggcgagtttgatcaagctgaaaatttctggcttccacagcgtggagacaacgtgtttaccgtcgcgggaaactaagtccagtgcttgcgggcgcaagagctgcgcggaggtccagcgagttttcggcagttgcagaaagatatcgacatccagtccggtctggtggctggcatgaccgccgttgaaacgcccaccagcgggcatccccatatcgccaatcagcaccgtacccatgcccagattgctcacctggctactcagacgctggataaacatcaccagatccgggtgaccgaaatagcgacgctgatcggtacgcatgacctgataatgttcggactgtatcggcagcgtgtcagcgccgacaatacagccattagaaaaactgcctatgctttgtgcgctacccggcacaggttgggttattttttgccacggcgtcgctgccaggctggcgctactggcaagcagagccagcagcgcaatcgcggttttattcattttttaccagcgtggaatatcagtcttcacatcggcattttgcgcccgttgccgtaacaggtgatccattaaaacgatcgccagcatcgcttctgcgatcggcactgcgcggatcccgacacagggatcgtgacggcctttggtgatcatctcaacttcttcgccaaagcggttaatggtacgacccggcacggtaatgctggaggtcggtttcagcgccatatgggcaatgatttgctgcccgctgctgataccgccgagaatgccgcccgcatggttgctctggaaaccgtctttggtgatttcatcgcggttctggctgccgcgcagcgccaccacgtcaaagccgtcgccaatttccacgcctttcaccgcgttgatgctcatcagcgcatgggcgatgtcagcatccaggcggtcaaagaccggctcgccaagtccggcaggaacgccactggcaacaacggtgactttagcgccgatggagtcgccctcttttttcagcgcacgcatcaactcgtctaacgcgtcgattttgtcggggtccgggcaaaaaaacggattttgctcgacctggctccagtctttgatatccagcggaatgtcgcccatctgggtcaggcagccacggatttcaataccaaatttctcggcgagatattttttggcaatagctcctgccgccacgcgcatggcggtttcgcgggcggaagaacgtccaccgccgcgataatcgcgcagaccgtatttttgttcgtaggtgtaatcggcatggcctggacggaaaacgtccttaatcgcactgtaatcctgagagcgctggtcagtgttttcgatcaacaagccaatgctggtgccggtagtaacgccttcaaaaacaccggagagaattttgacctgatccggctcgcggcgctgggtggtatagcggcttgtcccagggcgacgacggtcgaggtcatgttgcaggtccgcttccgtcagcggaatgcctggcggaacaccatcgacgatgcagccgagcgccagcccgtggctttcgccgaaggtggttacgcgaaagagttgtccaattgtgtttccagccatcacggctccgttattgttgtgtttgcgtgtttacttaatctttataaatcgcgaaatgttctcgtgcggcaataagctgctctttggtgagcataaacacaccatcgccgccgttatcaaactccagccaggtgaacggaacatccggatattgttccataagatgtaccatgctgttgccgacttcacaaatcaacacgccatcatcagcaaggtaatctgccgcgttaccgagaatgcgacgcgtcagtttcaggccgtcagtgccagatgccaggcccagttccggctcgtggcggtattcgtttggcaggtcggacatatcttccgcatcgacatacggcgggttagtgacaatcaggtcgtactgcactttcggcaagtcgcggaacagatcggaacgaatcggaatgacgttgtggatcagaccgtgttcttcgatgttctgttcagcaaccgccagcgcgtctggagagatatccaccgcgtcgacttctgcatccgggaaggcataagcacaggcaatggcgatgcagccgctaccagtacacatatctaaaatatgctgcggttgcttgctgataagtccggcaaatttattgttgatcagttcaccaatcgggctgcgcggcaccagcacgcgttcatcgacgtaaaattcatggccgcagaaccacgctttgttggtcaggtaagccaccggaatgcgttcattgacgcggcggatcacgcgttcaacaatacggtgtttttcgctggaggtcagacgcgcggtgcgcatatcttccggaatatccagcggcaggtagaggctaggcaacaccagctgtacggcttcatcccacgggttatcggtaccgtgaccgtaccagatatttgccgcgctgaagcggctcacgctccagcgcaacatgtcctgaatggtttgcagctcatttactgcttcatcaacgaaaattttatccacgtattcctccagggcatgatcgcaataatttcggcggctagtttgccatgaagatgacgataaatcagcattcacgcgcggtgagtgaggaaaaatacgtttaaaacgatcgattgcgctacgagtcgggtaaactgtaggaaaattagaaatagagacagataaatgaaaaagaaaacaacacttagcgaggaggaccaggctctgtttcgccagttgatggcggggactcgcaagattaagcaggacacgattgtccaccgaccgcagcgtaaaaaaatcagcgaagtgccggtgaaacgcttgatccaggagcaggctgatgccagccattatttctccgatgagtttcagccgttattaaataccgaaggtccggtgaaatatgttcgcccggatgtcagccattttgaggcgaagaaactgcgccgtggcgattatagcccggagttgtttttggatttacacggtctgacgcagctgcaggccaagcaggaactgggggcgttgattgccgcctgccgccgtgaacatgtgttttgcgcctgcgtgatgcatgggcacgggaagcatattttgaagcaacaaacaccgctgtggctggcacaacatccgcatgtgatggcctttcatcaggcaccaaaagagtatggcggtgatgcggcgttgttggtgttgattgaagtcgaagagtggctgccgccggagttgccctgaggagttgagcgcgttgcgccaggtacgggtaatggcaggggcgaatgcccctgcctggtgtatctaagggttacaactcattcagtatgtactggaaccggcaagtagaatcgattggctgcatactgctggtatcaacacgcacgaccatatcgtgtaactgtttgtccgttatagggtgtcgatttggcgtgacgctgacttccgccttgtcacatccgctcgcggtaaaagttatcatctgtgcaacccagcggcagtaaccacctgtttcattcatctgcgtactgtcgcacaacttcccatctttcatcaaatacgtactaagcgttttctcaaccacaccgcccgtgctctgcagggtgagcagtttactcttactgacataattctcattccaactaacgtcataaggttgaacagaaacggatggacaaatcgtgtcgtgactatcaggcccctgatacgtcacgccccctggagaggcttcagagtcattcataataaccaaccatggacaagaaaagtaagattcaatctctgcagagacaataacctcaaatgtataatacccgcagttccacccagacggtaatccaggacaacttgctttgttgatattttgatggtagccaatcagcttaacgctaggggcaggaggaggaccactccagctcacattttgcaatatttccccagtcatgagccattgactacttttatattcaccaacgtacactgcggatggcatcattatttttaaattaaaagtcgcaatattacggctatcaccgttgtaaccgtagtaaacgtcaacgctatgcccggcagccatagcttctgtagtagcaataagcatgaccagagcgaacaaccatcgtagtattttcattttaaatatactcaaatgtcgcagttaaagaggcggtaaattcaccgatcgtcacatcacggccgcttttcgcctgtagccaggctctgaaattgatatcgttattgccattggttagcgcaaaggtcgccccatttgtattgttgatggcaacctgcattccgtcggttttttccatgccaattcccactccctgagcggtactactcgtatccagtgccagaaaaccgggttgttcgctgtcttctacccccgtgagcgtgacttttacgttgtatcccgccggccctttgcaatctttcagcttaaagactacgggtacacgagcggactggcctgcaacgttcaaatcctgacgactgaccgtgggaaagcgcacctctgccagatattggccatccaccaccagcgcacaggatttacttaataaattaccggagaaatgcagattattatctgccgcgaataacgtgctactcattgccaatatcagccccgctaacaggacgtaaccaccggactgaatcatacttttattcattgataatccacccgtaatgttgcgtaagcgctaaaattcgtatcgcttaacacagcatcactcgcttttaccggtacggcctccagcttcggcttttgcgtaaaatcagtggcgttgatagcaagcggagtattgagtttaaaacgctgaccatcgtgctgaagctcgataccaaaaccgggtacatcagtttcaattgctgcatcattaaaactggtttgtgtaccagtccaggtgagggtcatctcccaatctggatgacgggtcgtgctgtcacaagtgagttcatatggcacctctttacgaccatagttgccgttgatgtcgtcgataatgagatcgcgaaattcgacttcaatggttttaccaccgctgatgctacaggttggcggactcaataatgtcccgtgaaaggtgatgtcttcatcagcagcatgagctatggcgctactgacacaaagcagggttaagaaagtctttctcattgatagtccaccaccatggtcaaactggcgttaaactcgcccgcagcaagttgcgccccgcttgccttcacaggtacagccttcaactgtggctggttattgatattaaatggcgtccagctattttcaccgacggcaaacaaactgttatcggcgctattttctatccgaatgcccagcccggtgatattggtactgagtaccgtttcgccgttaatcgtactggtattgcccttaagttgcatccgcaagtcgttagcaagactgtttgtgcagttcaacgtgtatttcgcatcttgccgataattggtgccatcaacgttatcagcaatcatattgccgaactctacctggctgcccttgatactacagggtggcggagcatcgaccaacacgcgcagaattaaatccacgggtttactaccagccatagcagataaactacagacactgcataccagcagccctgcgcccactacaaacttttgactcataactccccccgtcatcagcctttgcggctctgctcttcatccacctggcagctgttgccattgcactggaagaacagcggcatccgtgcgccaaagtcgttgacgtaagtcagcaccggtacgctatccattttcacattcagcggtaccgtggttttcggctcaatgaccagagggctgaaccctgcagctggattaccgtttttctgcgcactggcgttgctgataatcacgtagtacggcgttgggttattgacggtaaatgcctgaccgctgcgggtgagcgtcaccttgtgctgccacggacttttcatactgaccttttccagcgcctttggtcgccagaacaacttgatacgcgtttgcagcgcgatttgcagggtattgggtttgttactttttggcgggatctcgcgcacgttaaagtagaacatgctttcacgatcggctggcaatttgttgatatccggcattccctgcacttttacctgcccgttcatcatactatcgatgcgttgcactggcggcagcacagttaacgggctggtgatcttgttacccttttcatcttcaatccagctttgagccagataagggagtttcggatcgttattacgcagcgtcacgctgatacttttgtcgctttcattaaatatcaaacgggtacgatctggcgttacagacgccagggcagacaaactggtagcgctaagcagtaacgccagcgtcatagcacccaatttggcagagcaaagtaaatcagacatggatcattccttaatcacgttattggttagcactaacagaaacagggggatcggtgggtgtcacctgttgcgtctgctcctgaatgacaggctttatgtcatcaggaacaaccggcgcgacgttgcctttatgctggcatggcagtaacaagccgttaaacagatcggcaggcagcgggtccggcaggttgatatcgcaatgcgcaacaccactccagaacacactcatatgttcgccaggtttcaccccagccagatagacactaccgtcatcatcgacaaggcccactgtctgctcgttatcattttttacttctgcgccaaacggtggatggctgccatcttgtaaacgcagcaccgccatcgctttttgaccactgatgacggcaaatttgcggtagccaatggctccttcagttagcgtggcttgcaccacgctctgggttgcttcggcgttttccggcaatttgttgaggtcgatatacgcctgattgcgataataattgttaacgtcagaaacgacggctttaccaaacatattggtataaacagcagccccgttaccttccaccggaacatcggcaacgccatcggcatcaatcagcaggcgtgtcccgcccatattctgggtacggtgaagtgcgccgccgtgggtagtaagcgttgcgccgccctgtaagctcaagcccgcagaggtgtattgcccttcatggtagttcgcactgaggtcaacctgcgccaggctaccatcatggctgtagtagccatcaacgctggtgtgtttgtcactggtgccgatgttcaactgatagtgagtcgcgtcatcgacacggctaaaataaccgacctggctgctgtccgtcccactgccatagttgccgttatagctaacggtactgttgtcgccccacggcatactgagcgaaatttacatgcccttatccgcccggttgtcatactcgtagcggtagccagtcagggaaacgctcatattacgaatgctgcccatattgaaatagtgggagagcatgatgttgtagtttgtctgctcctcacgatcccagtaggtatggcgggtatagttgagataaacgctaacacccgcatcgcggaagttctggttataagtggcggtgtacatctctttgtcgttgcccgtacggaccatttcgctgtcactggcatccagatactcgctcatggtcataaagttctcttcgctgaagcgatatccagcgaaagtgacgcggctgttgagctggtcaaagtctttggaataactcacacggaaggagttaccgtccaggctacctttgccataagcggtgtctttatccagtttggtatggctatgagtaacatcaaacgcgaccgcgccgaaggtagacaaatcgcgaccgacgcccagcgccgcagactgatagttttcatcacccagcgcaccgccatataagctccagccgttagcgatgccccaggaggcttcagcaccagagaaaaatcccccctcgacatggtggccccactcttgcggacgtcccatcatgatcttatagcgaacctggcctgggcgagtgaggtatggcatgctggcggtgctgatgtcatattcctgcacctggccgttctgttcttcaatgcgaatatgcaacgtaccggagacggaatcaccaagatcctgaatacgaaacggtccagccggaacctgcgtttcgtaaatcacacgccccatctggctgacggtcacttttgctgtggtgtgtgccacgccggaaatgtctggcgcgtagccgcgcagattgggaggcaacatttgatcgtcagtgctgacactgccaccaacataattaaaaccgtcgaaaatatcggaattgaggtaatcttcgcccagcgccagtttggcttttaaactcggtaacgcccgccaggcataatagcgactccactcccattttttttgtgtgtcatcgccgccaaattcatcgtcatcatcattactgcgcgtatgttgatagttggtctgccagtcagcgcgcatacgccatggccccaggttaaccccgaccgtcccgttgccgctgatctcgttactgtcatcgccgccattttcttcgtgtcgtgtttgcgcagtgatgctgtagtccgcaatgatcccggagatgccatcatcccaacgagaaggtggatcccagtcgggccaggtatattcgaggtaagcctgcggtagactaatgactaatgcggactggcttaaatcagccttaatttccacgccttccagttgaccgggcttcaggcatttaccatcgtggctccattgcagatttttcgccacgtcttcttttaaaccaaactgcgccaccagttccggtgtcagacaagcatagcttttgctaacgtcatcttcaccagcataccagtaaatatcgtactcttccgccaatggctgtttatttagttgaacctgtaaattgtattttccgggctcaacatacccctggctggaaaaacgcttcagatcaatttttgtgtcgccttttaattccagaaaacgggaatcaaactgaatgtcgtcttcagcccagacactgctataactcccactcattgccagcgcaatgcaccacggaagaatccgtaatcgaaaaagagaatggtcaggcatacacgtttttatccgtttttattcttgttcggtcaaaatccatttaaataccccatagcagtgtcgctatgggggtatgccttacaggtaagtaatctggaaggtggtatttgcttcgaaattacccagatctggcgcatcagctgcgccgaccagccaggctttaaagttcagagtctgcttcgctttgcctttattagtggcagtatctttcacgattttctggtcaatacccatgccgcttttgtaagaggtacccagagagtcaccgatcgccaggctaacattgttaaatgccgcaccggtatcggtattgaaaatggtgtaataattgccgctatttgcagaagaaacggtaccagtaaaggtagtggtcattgtttcctgagtatcaaatacgcaatcttgcaggcgaatctggaaatttttcggcgtggtggtgccgttatttttcagtttttcggcaccgatatcacccatatcaacttccagtttgtgatcgtccggaacgatagaacacacactgtcttcaatggtgccgtaaaaacgtgcagtaccgttgttacccgcagcgattgttgccgtagaggtgaacgcgcccatcaccattgccgcagcaatagctgttttaacaaacttactcattatttgtccttaaactataaataattaaaatataaacattgcaatacattgattcagtcaatagccaatgtttatacccagccattgaatacggcatgcgatccaaaaaaacaggtcgtaaaaaatgtattcgttggtgtggggtcgaatagtgatgttttcactcccctgattcaatttaattttactaatgagtaaatgtagatttaattaatatattgataggggaaagattatcttaaggatcttctaaaaaaacacgaaatatatatttagaaaaaacaggaagcatatcaacaatgaatgccaatagcttaaaaaacaaacaatgaacatataatgcgattggcattaacccgcttttgtcgatataatatataaacactatagccagaatttaatcaagtttcaattacgtcctgcctgattattcaactctattttctccattatctgtattaataaatgataatgagtgtcaaacagacattattcatttcaacatgtaactttgggcaaaatcaagatacgcgcagaagaatactttccgaatgaaagttaaaggtgttttatttatagatggggagagtcttcgatagtagtgaggttgacagatatccgctgcctgatgagcaattatgcccaatgaatctacctcattgggcataatttggaactcatcagatagcttttgccatcttcagattacacgggctcatctgccagttgaatgtgccgtttccgctttcatcaagcgttacgctggcaatggcgctggtggtaaacataggcggcgtttcgcccggacataactcggcaaccagatacccgactaacggtaagtgagagatcaccagtacgctagcaacaccttcattggtcaacgcctgcaaataggcactgaccagaccaacatcgccgcagggcgttaactccggcagaacttctgcactggaaggcaggttcagacaatcccctacttcttccagtgtttgctcggctcgcaggaacgggctcaccagaacgcgttcgatttccactttttgacctttcagccagttcgccatcaggcgagattcgtcacaaccattagtggtcagaggacgaacggaatcactggcggcatcgagggctgcgtcgccgtgacgcatgataaaaacttgcatattgcaccgcttttgttaaccagattcgcccgttttctttcatctgaaaccagagaaagaaaacggtggccggcattgtgccttatccattcaccgaatgaaacgctgttttttacctcaatggcgtaagtatagtcaatatgcgtttacattttgaccaacactccgccattcagcgcggattcatatagctttgaccttcttattgcaggtcagttgcagttgttttccaaaaactttccccacgcgcgcccatctcgaccaaacgctcgcaaggggtaaaacgggaaccatactgcgtggcaagtcgttgcattattgcaaccacttcgcccgcgccgagagaatcgatatagcggaacggtccaccgagaaatggcggaaaaccaatgccaaataccgcgccaatatccccgtcacgcacgctacggataacctgctcatcaacacaacgtactgcttcattcagcatcaacatcacacaccgttcagcaacctgcggtgcggagattcgcccctgcccttgtgtgccaatcagcgggtaaatggcgggatcgacctgttttttgcttttacgccctttctgaccataaagatagaaaccccggccattttttctgcctttgcgatcgtcgttcaaaatactagaaacaacatttgcaggcgcgctaaaacgttctccataagcggcttccagtacaggaataattttagtcccggtgtcgattcctacctcatccaaaagttggattgggcctaccggaaaaccaaatttcactagcgcggcatcaatgtgctctacccgttcaccttgggtcaacatgcggatagcttcattaatgtaaggcgctaagatgcgattgacgtaaaaaccggctttgtcacgcacgacaattggcgttttaccctgttttttcgccagttttactgtggtagcgatggtttgcgcgcttgtccccgcatgaggaataatctccaccagcggcattttttccaccggactgaagaaatgcaggccgataacttgctcaggtcgcgtggcgtgagcggcgatatcaccaatcggtaaagaactcgtattgctagcaaagatggtatgagcggcgcaattttgctcaacttccgccaccatctgttgtttcaattcgagattttcaaacaccgcttcaataatcagatcgcgatgggcaaagccgcgatagtccgtcgttccggagattaatgccagctgtttgtcacgttcgctggctttgagatgacgacggcgaactttgccctccagctgatcccaactgtacttcagcgcatgatttatgccctgcgggttgatatctttaattctgaccggaatccccgctttacaagcagtgacataagcaataccgccgcccatcaagccaccacctaaaatccccacgctgtttaatggcgcaggcggcgcatcactgccgggatctttcttcacgtccgtactggcaaaaaagatactacgcagcgcctggctttgtggcgtcatcgccagttcgccaaacgcccgagcttcggcgtcataaccgctgctggtgccctgcgctaatcccgtttcaacaacctccaggatgcgttctgtcgccggataattgccttgagttttgtgttctgttttcttgccgaccattttgaacagcagcgcacgacctaacggccccgccagaatacgctcgcgtacaggtagagggcgggaagatgggcgctccttctttgccagctcaacagcggcttccagcagaatggagtgcggaacaacgtcatccaccagccccagctttaatgcctgtttcgcccgaagttgttttccggtgaggatcatctctaatgctgtgctgacgcctatcagacgcggtaaacgctgggtgccgccactaccgggtaacaatccaagttgtacttcaggcaaaccgagcaccgttttaggatcgtcagtacaaacgcgaccgtggcacgccagcgccaactccagcccaccacccaggcaagcgccatgaatagccgcgataacctgaatgggcaaagcatgaatctccgccatcaactgttggccctgccgcgccagagcttccgcttcttgcgccgttttgcagttgccgatcatgttgatgtctgcgccagcaatgaagttgtccggtttagcggagacaaacaccacgcctcgcaactctttgttttcacggagttgcttaataatggcgcgcacctggctggcaaactccgccttcagggtattcattttctcacccggtacgtcgatggtgataacggcaatgttgtccagacgaacattaagggtaaacgcacttgtcatttccattattccgcctccagaaccattgccgcgccaagcccaccggcagcacaggcggtaactaaaccaaatccaccgccgcgacggcgaagttcatgcaatgtctgggtaatcatccgcgcgccggtcgccgcgaagggatgcccgtaagcaatgctaccgccaagcacgttaaatttgctatcgtccacttcgccagtggcatgtgcacgccccagtgcttcacgagcaaaacgttcactacccagcaactgaatattcgccagcgtctgagctgcaaaggcttcgtgcatatcgatcaatgtcagatcgctcatcgtcaaaccggcacgctccagcgccagcggtgtactccaggctggaccgagcaacatgtcctgccagacatcaatcgcagtaaatgcgtagctgcgcagataccccagcggcaccagccctaattctttcgcccgggattcagtcatcaggatcaccgctgccgcgccatcggtcagcggcgtactgtttgccgccgttaccgttccgtgtttgcgatcaaacgccgggcgcagctttgcgtaatcggcaaggctggaattaccgcgaatattgttgtcttcgacaagcggttgtttataaggagggataaaggcagtcatcacctcttctttgagttttccgtcactccatgcctgagcggcacgctgatggctacggtgcgctaatgcatcttgctgttctcgggtgatgccgtaggttttcgccatttgctctgcggtgtcgcccatccgcaagccggtagaatattctgctaccgcaggtggtacgggcattaagtcgcgcaaacgcaggcgagagaagagtttcagtcgctggctcatggtacgagctttgttgacatcaaccagcacgcgcgccagttttttactgacgccaattggcaatacgctagaggaatctgccccaccggcaatccccgctcgaatagttcccgccatcaggctttctgcgacgtttgcaactgcctggaaactggtagcgcaagcgcggctgacgctgtaagcatcggtatgtacattcattcccgtaccgagaacaatttcacgcgcaatgttgggggcttcaggcatttgtacgacctgaccaaagaccagttgttcaatcacttcggcggggatctcgctgcgtgccagcagttcgcctaccaccatcttccctaaatcaaccgcgggaatgccatgaaaagccgtcgcctgacgggcaaaaggcgtacgtaaaccgctaacaatggcgatacgatcgccctggcgggtaaccagcggtaaaacctgacccataacactcccctgtaaaaaaataaataaagtggtctgacctgatcatagtcttaaccatttttttacatttagccaagtggagaaaagggaaagtgggagctatgacacagagagaaaagaagaagagaaaagaaaacgcccctgccagcaactgacaggggcgtacgtacccgagaggaattaacgcagacccagctggaaaatcagcatttcagcttcgcaggcaaaagtgaaatcgatatccaggcgcacaccgtcagactcttcagtgaaagtcggggtgattttgcaaggttcagattccacgctacgggctttttcagtcagcgccgccagcgtttgctctgcttctgcgcggtttgcaaacacgcggctgtaagacgcggtgcagtcggagttgtccataatggtgccaacatccatacagcagcaaaccggggtttcatcagcactacatttactcatcgttgatttcctctgtatgtgcacccaaggtgccagataaacgttgtggatattttacgcttccggaaagtgctgctccagttgttaattctgcaaaatcggataagtgaccgaaatcacacttaaaaatgatctaaaacaaaattcacccgaatccatgagtgcgccacctccaaattttgccagctggatcgcgtttcttagatcatatttgaaaaaagatagaaacatacttgcaacattccagctggtccgacctatactctcgccactggtctgatttctaagatgtacctcagaccctacacttcgcgctcctgttacagcacgtaacatagtttgtataaaaataaatcattgaggttatggtcatgagccagaaaaccctgtttacaaagtctgctctcgcagtcgcagtggcacttatctccacccaggcctggagcgcaggctttcagttaaacgaattttcttcctctggcctgggccgggcttatagtggggaaggcgcaattgccgatgatgcaggtaacgtcagccgtaaccccgcattgattactatgtttgaccgcccgacattttctgcgggtgcggtttatattgacccggatgtaaatatcagcggaacgtctccatctggtcgtagcctgaaagccgataacatcgcgcctacggcatgggttccgaacatgcactttgttgcaccgattaacgaccaatttggttggggcgcttctattacctctaactatggtctggctacagagtttaacgatacttatgcaggcggctctgtcgggggtacaaccgaccttgaaaccatgaacctgaacttaagcggtgcgtatcgcttaaataatgcatggagctttggtcttggtttcaacgccgtctacgctcgcgcgaaaattgaacgtttcgcaggcgatctggggcagttggttgctggccaaattatgcaatctcctgctggccaaactcagcaagggcaagcattggcagctaccgccaacggtattgacagtaataccaaaatcgctcatctgaacggtaaccagtggggctttggctggaacgccggaatcctgtatgaactggataaaaataaccgctatgcactgacctaccgttctgaagtgaaaattgacttcaaaggtaactacagcagcgatcttaatcgtgcgtttaataactacggtttgccaattcctaccgcgacaggtggcgcaacgcaaagcggttatctgacgctgaacctgcctgaaatgtgggaagtgagtggttataaccgtgttgatccacagtgggcgattcactatagcctggcttacaccagctggagtcagttccagcagctgaaagcgaccagtaccagtggcgacacgctgttccagaaacatgaaggctttaaagatgcttaccgcatcgcgttgggtaccacttattactacgatgataactggaccttccgtaccggtatcgcctttgatgacagcccagttcctgcacagaatcgttctatctccattccggaccaggaccgtttctggctgagtgcaggtacgacttacgcatttaataaagatgctagtgtcgacgttggtgtttcttatatgcacggtcagagcgtgaaaattaacgaaggcccataccagttcgagtctgaaggtaaagcctggctgttcggtactaactttaactacgcgttctgataacgcgttcgcctggataaagtcacctgcatagcaggtgactttaactcccccacttcaccgaaagtagtgtcctcattgcttacctcctgagttttgcaaacagcctgttggcagcttgccctttcaaatcaataagcggtatccacagacaaacctgaagggaaaggcatattttcaggcgttctgctcgtccttctcaaagagtttacttttctgcatttccaggatactcccccccccctggctattgtgcgctcatacactcaaattaaagataggttctaaataaatgagcgttttttgatagtctatttcattaggtaatatatatttgtaacaaatcaatcaaaatggaataaaatcatgctaccatctattagtatcaacaataccagcgcagcttacccagaatccatcaatgaaaataacaatgatgaagttaatggattagtacaagagttcaaaaacctttttaatggtaaggaaggaataagcacctgtattaaacatctacttgagcttataaaaaacgccatacgagtaaacgacgatccttatagatttaatattaataattccagtgttacttatattgatattgactccaatgatacagaccatattactattggtatcgacaaccaagaaccaatagaattacctgcgaactataaagacaaagaactcgtccgtactatcattaatgacaacatagttgagaagactcatgatatcaataacaaggaaatgatcttcagcgcattaaaagaaatatatgatggagatcctggttttatcttcgataagataagtcacaaactcagacatacggtaacggaatttgatgagagcgggaaaagcgaaccaacggacttatttacctggtacggtaaagataaaaaaggcgactctctcgctattgtaattaaaaataaaaacggaaatgattacttatctctcggttactacgatcaggacgactaccacattcaaagaggaattcgtattaatggtgatagtctcacccaatattgtagtgaaaacgccaggagtgctagtgcgtggtttgaaagcagtaaagctatcatggcagaaagttttgcaactggttccgatcatcaggttgtaaacgagctcaacggggaaagactgagagaaccaaacgacgtttttaaacgttatggtcgagcaataagatatgattttcaagtggacgatgcaaaatataaatgcgaccatctaaaagaaatagtttctactttagtcggtaacaaaattaacgttggccattctcaaaaaatatataagcattttaaggatctcgaaggtaaaattgaagaaaggcttcaaaatcgccaggctgaatatcaaaatgaaattaatcaaccatctgcgccaggtgttaattttgatgatatttaaaattatttttccagttttttgatttttcaacagctgaatatcggaaatagtcagtgacgaacatcagtatttttacataattacgtctaggtcattgtcggtttatctccttttacttgtggtaattgagggataacaacaaaaaaggtgagttttgcgactcaccttttttatttgtttcttattcagaatcaatatcttttaaatcatcctgaatcgcttgtgcgttcggattttcctgcggtttgagttcgccgccattagcgatgaaatcatgacgctggaagtacgcttcgcgcaccataatataaggatcggagctctgacgcagcagaccatcggaatccagcagctgagcgcgggtttcgatcccttcaagcgtccatttacccacagacatcggccaggtcagccaggaaagaaccgggtaaaaaccatccgccatatcaccaccgtcatcacgcagcgtgaagctaccgtagaacggtaactgaacgtaaggcccataacccacgccataatgaccaagcgtactaccgaagcggtgaggttcagtccgttgcagtttcgggttcgccatccctgcaacatcaataaaaccgcccatccccaaaatggtgttcaggaaaaagcgggtaaagtggaccatcccctgataagggtcgccctgcaagaagtagttaaccatcaccgcaggttcttcaaggttgccagtaaagttgctcaaaccgttacgcgccggttgcggaacataatcacgccaggcgacagcgaccggtcgaacaatatacgggtctaatacattgaagttgaagttgtacatggtgcggttgaacccttctaacgggtcagaacgcccttgctgatctgtaccggaactcgcacaccccaccagaagcgtagttcccagagcaagcgcgctcaggcgaagcttcataaatgtctccctgtttttttatggcttatgcagtttgccatccatgacggaacgataccgtatccgcctgtttaggtgtgggcgattgtaacagcacgtcaactgatgtccagacgccctgatttgctgatttgatcatagcctggtaatcgccgccctgtaggctacttgattctatagaaacagaaaaaggcaaacgcagccttttctacattttcagagtaactcccgtcagttgcgagcaaaaaagccgctacgctttagctatacgtgctaattcaagagaagagaccatggacaacgacaaaattgatcaacacagcgacgaaattgaagttgagagcgaagaaaaagagcgcggcaaaaaaatagaaatagatgaagaccgactcccctcccgggcgatggcaattcatgagcatatccgccaggatggtgaaaaagagctggaacgcgacgcaatggcgctactgtggagtgccattgcggcgggtctgagcatgggcgctagcttactggcaaaagggatatttcaagtcgaactggaaggtgtgccgggcagcttcttgctggagaatctcggttatacctttggttttattatcgtcattatggcccgccagcaattatttaccgaaaataccgtgactgcggtactacccgtcatgcaaaaaccgacaatgagcaacgtcggcttacttatacggttatggggcgtcgtgctgctgggtaatattctcgggacaggtattgcggcgtgggcatttgaatatatgcctatcttcaatgaagaaactcgcgatgcatttgtcaaaatcggcatggatgtgatgaagaacacccccagcgagatgtttgccaacgcgatcatttccggctggctgatcgccactatggtttggatgtttcctgcagcgggtgcggcaaagattgtggtgattatattgatgacctggcttattgccctgggtgacaccacccatatcgtggtcggttctgttgaaatcctctatctggtgtttaacggtacgctgcactggagcgatttcatctggcccttcgcactacctactttagcggggaacatctgcggcggcacctttatcttcgcgttaatgagtcatgcacagattcgtaacgacatgagcaataagcgtaaagcagaagcacgccaaaaagcagaacgtgcggaaaacattaagaaaaattataaaaacccggcataaatggcgagggtttaagcaatcgagcggcagcgtacttaccccgcactccattagcgggtatactcatgccgcattgtcctcttagttaaatggatataacgagcccctcctaagggctaattgcaggttcgattcctgcaggggacaccatttatcagttcgctcccatccgtaccagtccgcaaaatcccctgaatatcaagcattccgtagatttacagttcgtcatggttcgcttcagatcgttgacagccgcactccatgacgggtaaaaagtggataaaataattttacccaccggatttttaccctagagccatacagcctcacactcgatgaggcctgtcagtttcttaaaatatcctgatctaccatcgccgtcatagagcgtatttttattacctgatttgcaggttcgattccctattcggagatagcactcatgcaacacgaactacagcctgatagtctggttgatttgaaattcatcatggctgatactggctttggtaaaaccttcatctatgaccggattaagagtggcgacctgccaaaagccaaagttatccacgggcgagcaagatggttatatcgtgaccattgtgaattcaaaaataagctcttaagccgcgccaatgggtaaaatagcgggtaaaatatttctcacatctaaaaaacaccattccaatcaatcccctgctgcttcaagtagatgtctgcaggggacaccatccttgtgtttatccctaaaaccacataaaaaccgtaaattaaattcgaactagcaggccgaataaggcacaccaggaactcgtggttttattcattaactagtggtttttacctgttctcttagccagataataaacgcttcaatttttggccactgcctgcccggtaatgtggtgatgtaataatgctgatggcatttcaccgtcatatcgccaaacggcgcgacgagctcaccactggcaagccttttttgtaccaggcgttttcttcccatcgccaccccaatatgattcatcgcggcaataacagctaaatcagaacgatcaaagccaattccagaagatgtcggcaaattaaccgcataatgttgcgcccaactatgccattcatccgtaccggagtcgttgctccatgcctgtctgtcatggagcaacgtacagtgacacaggttaattaccgtgttggttaaagcatgtctttgagcgtattccgggctacatactggcaggatttcttcatccatcagaaagtgatgagtgagttgcgcactcggcgcatcatcaaagtagatcgccaaatcgattccggcacgttgcagattgacgttgtcattaccagtgagcacggtgaggctaatagacggataccggcgtgtaaagtcacctaatgcgggcaccaaccagcattgggcgatagagggccgggaatacagagttaacgttccgcttaactcctgatttttgatatcaagaatttcctggttcagggtatccaggctgctttttagcgcccaataaacacgtttcccctcgtgcgttaattccactttgcgatgggaacgaacaaacaactgaatgcccaattcttcttccagctgattgatacggtgacttaccgcactggggctcaggctcaattcctctgccgccagggcgaaggactgatgcctggcagccacttcaaaagtatgcattttacttaattgccagccgttaagcagccgatttcttatttcacgaaggggttccataatcacctcatttttcgcttaagtgtaaaaaaatagcggcaaaatttcagctatgagatgagctaaagtgaaccatatctcaattcaccttcatttttagatgtaaatcactccattgatgcaatttacctcatgtgaaaggcaaattttatcgtttgtcagcctgcgttgtttttttgtccaatatcatcaggttaatcacaggggaaggtgagatatgcactctcaaatctgggttgtgagcacgctgcttatcagcatcgtgttaattgtactgaccatcgtgaagttcaaattccacccgtttctggcgctgttgctggccagcttcttcgtgggaacgatgatgggcatggggccactggatatggtaaatgctattgaaagtggaattggcggaacgctggggttcctcgcagcggttatcggccttggcacgatactgggaaaaatgatggaagtatccggggccgcagaaagaattggtctgacacttcaacgctgccgctggcttagtgttgatgtcattatggtgctggttggcctgatttgtggcatcacgctgtttgttgaagtgggcgtcgtgctattgattcctctggcttttagtattgccaaaaaaaccaataccagtttattaaagcttgccattccgctatgtaccgcattgatggcagtgcactgcgtggttcctccacatccggctgctttatatgttgccaataagctgggcgcagatatcggtagcgtgatcgtctacggtttgctggttgggctgatggcaagtctgatcggtggcccacttttccttaaatttctgggtcaacgactgccctttaaacctgtacccacagagtttgcagatctcaaagttcgcgatgaaaaaacactaccgagtttaggcgcaacgttattcaccatactgctacccattgcgctgatgttggttaaaacgattgccgaattgaatatggcgcgtgagagtggtttgtatatcttggttgagtttattggcaaccctatcactgccatgtttatcgccgtgtttgtcgcctattatgtgttgggtatacgccagcatatgagcatggggacgatgctcacacatacggaaaatggcttcggttctattgctaatattttgctgattatcggggccggaggcgcattcaacgccattttaaaaagcagcagtctcgctgatacgctggcagttattctctccaatatgcatatgcacccgattcttctggcctggttagtggctcttattctgcatgcggcagtgggctccgctaccgtggcaatgatgggggcaacggcaattgttgcacccatgctgccgctgtatcccgacatcagcccggaaattattgcgattgctatcggtagtggtgcaattggctgcactatcgttacggacagccttttctggctagtgaagcaatattgcggcgctacgctcaatgaaacatttaaatactatacgacagcgacatttatcgctagtgtcgtcgctctggcgggcacattcctgctgagttttatcatctaagcgcaaagagacgtactatggaaaacgctaaaatgaacagcctcatcgcccagtatccgttggtaaaggatctggttgctcttaaagaaaccacctggtttaatcctggcacgaccagtttggctgaaggtttaccttatgttggcctgaccgaacaggatgttcaggacgcccatgcgcgcttatcccgttttgcaccctatctggcaaaagcatttcctgaaactgctgccactggggggattattgaaagtgaactggttgccattccagctatgcaaaaacggctggaaaaagaatatcagcaaccgatcagcgggcaactgttactgaaaaaagatagccatttgcccatttccggctccataaaagcacgcggcgggatttatgaagtcctggcacacgcagaaaaactggctctggaagcggggttgctgacgcttgatgatgactacagcaaactgctttctccggagtttaaacagttctttagccaatacagcattgctgtgggcagtaccggaaatctggggttaagtatcggcattatgagcgcccgcattggctttaaggtgacagttcatatgtctgctgatgcccgggcatggaaaaaagcgaaactgcgcagccatggcgttacggtcgtggaatatgagcaagattatggtgttgccgtcgaggaaggacgtaaagcagcgcagtctgacccgaactgtttctttattgatgacgaaaattcccgcacgttgttccttgggtattccgtcgctggccagcgtcttaaagcgcaatttgcccagcaaggccgtatcgtcgatgctgataaccctctgtttgtctatctgccgtgtggtgttggcggtggtcctggtggcgtcgcattcgggcttaaactggcgtttggcgatcatgttcactgcttttttgccgaaccaacgcactccccttgtatgttgttaggcgtccatacaggattacacgatcagatttctgttcaggatattggtatcgacaaccttaccgcagcggatggccttgcagttggtcgcgcaagtggctttgtcgggcgggcaatggagcgtctgctggatggcttctatacccttagcgatcaaaccatgtatgacatgcttggctggctggcgcaggaagaaggtattcgtcttgaacctagcgcactggcgggtatggccggacctcagcgcgtgtgtgcaagtgtaagttaccaacagatgcacggtttcagcgcagaacaactgcgtaataccactcatctggtgtgggcgacgggaggtggaatggtgccggaagaagagatgaatcaatatctggcaaaaggccgttaataacgtttcaacgcagcatcgcaatcctttccctgggtgagcgatgctgccgatggcgcagacttaagatccccggtcttacccgctataaccccctccttttatcatcacccaacgcctttcgctgtaaacggcggtttcgcaaaccaaaccaaaaccgtaagtaagataaaagcaatagccgccatacggaaaatctcatttgcagaaatagaaagactctgctgggttatttcattattaatttcattaagaactccactaaggctaccataatatttatccataatttgactgctactattaaacacggggttaaattgatcgatggttgctgtcaactgactatggtgtaagctttcgcgtcgtccccacagcgtcattgtcaagctcgtaccaacacttccactcaaggtacgaaaaaaattactcatactgctggcattggcaaatttattatctggcaagccactaaagctaatcgttgttaagggtaaaaagaaacaggcaacggcgaatccctgaaaaaactgcggcaaaatgatgcctgtaaaatcaatcgttggcataaatgtcacagaacgccagtaatagcaaaccgcatacatcaaaaaactaaatgtcactaacaaccgcatgtctattttgttgccataacgtcctatcaaaggactaattaatagtggcatgatgccgatgggcgcataagcaagtccggcccatatcgcattataccccatcgtttcctggagtaactgcggcataaggacgatcgctccagagtaaaataaatacgcgcatgtgatactcacaataccaatggtgaagttacgggacttaaacaaactgagatcaagaatcgggttctcactggtgctctcccaaatgactaaagagatcagagaaataacacttactactgttaatattattattgtactgctgttgaaccaatccagatcgcgccctttatcaagcataatttgcaagccaccaacaccgagcactaacagggtcagtcctggtagattcattttgaccggactagtctcagtttctcttcctttaagtaaggttaagcataatgtcaggacgataatccccatagggacattgattaaaaatatccaaccccagctaaagttatcacaaatataaccgcccaatatcggcccacatatcggagcgataatcacggtcatactccataatgccagagcaaatgttcttttttctggcggataattccttaataataaactctgactcagtggaattaacggccccgccattaacccctgaacgactctaaaaaatatcagcacatcaagattggtgcttaggctacacattaaactagacaggctaaaaaaagtgacactaagtaaaaataatcttaattcgcctattctttgtgccaacctgccagtaacagggatcgcaatggcatttgctacaccaaagctggtgataacccaggtgccttcgtctgtacttgctcccagaaagccagatattgtcggtattgcgacgttagaaatagtggaatccaacatttgcataaatgtcgctaaactcaatgcaatagtgacgcaccataacgtcccaccggttaatggtgccggagtacttttagtgattgccattaaagttgtccattatggctaataatgttgctaatttctttttctatcggactggtatcgataactaaagccttactggtataagccggcatggaggtcacggtactagccagctcaggcatctcggcaatgtcttcgttcttcgtatcaatagttgctgtcatgcttaaaccaatacgcaaggggtgttccatgagttcttttggatcaagagaaacttcaaccggtacacgctgaacgattttgatccagttccctgtcgcattttgtgcaggtaataaggagaacgcattgccggttcccatattgatccctgtcacccgaccatgaaacacaacattttcaccataaagatcgctgataatattgacgctttgaccaatccgtacatccgtgagttgtgtttctttaaagttggcattaacccacatttgacgtgccggtacgacagccattaagctttgtccggggctcactgtttcgccgacctgaacacttctctgggcaatatagccggtaaccggactcttaatatccgtacgtttaagcgccaaccaggcttctttagttgcatccgccgcttcaacgacttgtggctgacggtttaatggtgtgttcattactaaagctttattcgctttataagcctggatagcggcattcaatgccgctttgctacttattaacgtatctttggtatgctccagcgtttctttactaataaccccctgcttcgctaacggcactcgacggttataatcttctaaagattgttgatactgaatacgtgcactagcgacttcggcactgtattgtttatcctgtaagtatagtttattcgtttgccgaacaatatttgccagattatttttagctttattgagtgcgatagtggcatcagttttatccagactaactaaaatgtcaccttgtcgaacgtagttcgtatctttatgattaacgacagtgacactaccactgacttgtgcagaaattggatctgcattccccgtgacataggcgtcatctgtactaatcatgtcttctaattccatactccaataggcataggcaccactaaacgcaataaataaaactaccgccaataaagaaaagtattttcttctgttagaatgttttttattactattaatctgttccactattatctctcatttctcatagatgaaatttatgaattgaatgaaaagagcattcattcttcatatcaaacacagtgcatgtgttgcacattatcccaggaacgttggaggcctaatttaaatgaggtgcaaaaaaaacaacagaggactaaaccgtggcttttgcaatacaattcttacgcctgtaggattagtaagaagacttatagtgccaacttgaaactataaatcatcggtacaatccctgattttattgttgacatttcatttatgccgactatttatatggtatacttgtcgaattatcttaaaggaagctcagattttcttatttttattgagaaaatgagatgacgccttatgtctgtattactacagggagaagggagatgcttcattgcaaagggaataatctatgaacgcaataattattgatgaccatcctcttgctatcgcagcaattcgtaatttattgatcaaaaacgatattgaaatcttagcagagttgactgaaggcggaagtgccgttcagcgggtggaaacacttaagcctgatatcgtcatcattgatgtcgatatccccggagttaacggtatccaggtgttagaaacgctgaggaagcgccaatatagcggaattattattatcgtctccgctaaaaatgaccatttttacgggaaacattgtgctgatgctggcgctaatggtttcgtgagtaaaaaagaaggcatgaacaatatcattgcggctattgaagctgcaaaaaatggctactgctatttccccttctctctcaaccggtttgttggaagtttaacgtccgaccagcaaaaactcgactccttaagcaaacaagaaattagtgtcatgcggtatattcttgatggcaaggataataatgacattgctgaaaaaatgttcatcagcaacaaaactgtcagcacttataaaagtcgcctgatggaaaaattagaatgtaaaagtctgatggatctttacacattcgcacaacgtaacaaaatcggctaaccacatgaagtttttaccctatatttttcttctctgttgtggtctttggagcaccataagtttcgcagacgaagattacatcgaatatcgtggcatcagtagtaacaaccgtgtcacacttgatccactacgtctgagcaacaaggaattacgttggttagcgagcaaaaaaaatcttgtgattgcagtacataagtcccaaacggctacgttgttgcataccgatagccagcaacgggttcgtggtattaatgctgattatttaaatcttttaaaaagagcgttaaatatcaaattaacactccgggaatacgcagatcatcaaaaagcaatggacgcgcttgcagaaggtgaagtcgatatagtgttaagtcatttagttactagcccgcctcttaataatgacattgctgcaaccaaaccattgataattacctttccggcgctggtaaccacccttcacgacagtatgcgaccgcttaccagtccaaaaccagtaaatattgctcgggtagcaaattaccccccagacgaggtaattcatcaaagttttccaaaagcaacaattatctcttttacaaatttatatcaggcattagcatccgtcagtgctgggcacaatgattactttattggtagtaacatcattaccagcagtatgatttcccgctatttcactcactccttaaatgtagtgaaatattataacagcccgcgtcaatataattttttcttgaccagaaaagaatctgtcattcttaatgaagtactcaatagatttgttgatgctttaacaaatgaagttcgctatgaagtaagtcaaaattggcttgatacaggaaacctggcctttctgaacaaaccattagaactcactgaacatgaaaaacagtggattaagcagcatcccaatttaaaggtgctggaaaatccttacagccccccctattctatgacggatgaaaatggcagcgttcggggcgttatgggggacattcttaatattattaccttgcaaacaggtttaaatttttctccgatcaccgttagtcacaatatccatgctggaacacagcttagccccggaggatgggatataatacctggcgctatttatagtgaagatcgagaaaataatgttttatttgctgaagccttcataacaacgccttacgtttttgtcatgcaaaaagcgcctgacagtgaacaaacattaaaaaaaggaatgaaagttgccattccatattattatgagctgcatagccaattaaaagagatgtatccggaggttgaatggatacaggtcgataatgccagcgctgcatttcacaaggttaaggaaggtgaacttgatgctctggtcgcgacacagctaaatagccgttacatgatcgatcattactatcctaatgaactttatcattttcttattcctggcgttccgaatgcaagccttagcttcgcttttcctcgcggagaaccggaacttaaggatattattaataaagcactgaatgcaattcccccaagcgaagttctgcgcctgacggaaaaatggattaaaatgcccaatgtgaccattgacacatgggacctatatagcgagcaattttatattgttacgacattatccgttttattagttggcagtagccttttatggggattctacctgttacgcagtgttcgtcgtcgtaaagtcattcagggtgatttagaaaaccaaataagtttccgaaaagcactcagcgattccttaccgaatccaacttatgttgtaaactggcaaggtaatgtcattagtcataatagtgcttttgaacattatttcactgcggattactacaaaaatgcaatgttaccattagaaaacagtgacagtccctttaaagatgttttttctaatgcgcatgaagtcacagcagaaacgaaagaaaatcgaacaatatacacacaggtatttgaaattgataatggcatcgagaaaagatgcattaatcactggcatacattatgcaatcttcctgcaagtgacaatgcagtatatatttgtggttggcaagatattactgaaacgcgtgatctaattaatgcactcgaggtagaaaaaaataaagcgataaaggctaccgtagcaaaaagtcagtttctggcaacgatgagtcacgaaataagaacaccaataagctctattatgggcttcctggaacttctgagcggttctggtcttagcaaggagcaacgggtggaggcgattagtcttgcctacgccaccggacaaagtctcctcggcttaattggtgaaatccttgatgtcgacaaaattgaaagcggtaactatcaacttcaaccacaatgggtcgatatccctactttagtccagaacacttgtcactctttcggtgcgattgctgcaagcaaaagcatcgcattaagttgcagcagtacgtttcctgaacattacctggttaagatcgaccctcaggcgtttaagcaggtcttaagtaatttactgagtaatgctctcaaatttaccaccgagggggcagtaaaaattacgacctccctgggtcacattgatgacaaccacgctgttatcaaaatgacgattatggattctggaagtggattaagccaggaagaacaacaacaactgtttaaacgctacagccaaacaagtgcaggtcgtcagcaaacaggttctggtttaggcttaatgatctgcaaagaattaattaaaaatatgcagggcgatttgagtttagaaagtcatccaggcataggaacaacatttacgatcacaatcccggtagaaattagccagcaagtggcgactgtcgaggcaaaagcagaacaacccatcacactacctgaaaagttgagcatattaatcgcggatgatcatccgaccaacaggctattactcaaacgccagctaaatctattaggatatgatgttgatgaagccactgatggtgtgcaagcgctacacaaagtcagtatgcaacattatgatctgcttattactgacgttaatatgccgaatatggatggttttgagttgactcgcaaactccgtgagcaaaattcttccttacccatctgggggcttacagccaacgcacaggctaacgaacgtgaaaaagggttaagttgcggcatgaacttatgtttgttcaaaccgttgaccctggatgtactgaaaacacatttaagtcagttacaccaagttgcgcatattgcacctcagtatcgccaccttgatatcgaagccctgaaaaataatacggcgaacgatctacaactgatgcaggagattctcatgactttccagcatgaaacgcataaagatctacccgctgcgtttcaagcactagaagctggcgataacagaactttccatcagtgtattcatcgcatccacggtgcggctaacatcctgaatttgcaaaagttgattaatattagccatcagttagaaataacacctgttagtgatgacagtaagcctgaaattcttcagttgctgaactctgtaaaagaacacattgcagagctggaccaggagattgctgttttctgtcagaaaaatgactaaatagcggctcccacaatgttcaaatgtgggagctatttaccagcacatcttacatttaactactgaactcctggcgaatttgttccccatgctggtcgagcgttgccgctcccggcataacatgcgggtccgcgcagccgctgatttttatcggattacccggcatcattattcccccggcttcaatcaacatatttctcgcctgagtttgtggcaatttaatggcctcagccacacttaataacggcgcgacgggtacaccaacttcatgtattctggctaaccaaacttcagctgcctgcgtttttaacgtccgctcaatatattgtttaagaatagcctggttttgtacgcgtaaaatattgctgctaaatcggggatcattaaccagttccgtaagctccagtgcctggcataacgcagaaaaaagcttgtcattaccacaacaaatcgtaatcggcttatcctgagtattgaaaacatcaaaaggtgccatgtagggatggcgatttcccagacgttgtggactcttcccagttgcgatatatgccatcagaccatgctccagaaaactcagcgtggcatcaaacatcgctatatcgacatgcgcccctctctggctcttttcgcggccataaagtgcactcactattccgctgaataaatagacaccgccgcatagatccgcaagagatgtaccaacgcgcactggcggagcatcaggatatcctgtttccatcattatcccgctcattgcctgaatgatggtatcgtaggcaggagcatcttttagcggaccggtatgtccgaaaccactgctactagcatatatgaggcgcgggttgatttcttgaagcgtttcccaactaaaccccagtttttccattgtacctgggcgaaaattctcagctaatacatcagcttgtttgagcatatttataaatatacttttatcgtgatcattctttaaatcaagaaccacactctctttgccatgattaataaaactgtaatagagactctgtccatccacatagggaccaaatgtgcgggtatcatcaccatgacccggcggctcaactttaattacccttgcgcccatattacaaagaagttgagttccgaaaggtccattaaggacatgtgtcatatcgataactaataagccttcaaacggccctttgctttcattatttgtcatttgcttatgccttgaaaaaagccgaaggtgaaaagacacttcggcatttatgtaaaatcaataacatgattaattaactaaccagtcgactgacataaatccacaagggagccgtgacgacaaagcccagtacgctcacagccaaactcgctgtaccagtacgggtgtagacattaaaccggctggcaataatgattccggagaatgccggcggtaatgcgcctgccagtaccatcatctgcagatgttcgctgttcaaatgacatgccataccaacgagaagcagtgccagtggcatcagaatcagcttcaggaaggtgttataagcaatttcggcactgaactcgaatttatgtgcagccagagtcaaccccgcagcgaataccgctaccccactgttagccttcgcaatcagattaaaggttgggtcccatgctgccggaatttttaccccaaccaacaccaggatcgttgccagaacaggtgcccatactactggctcctttgccgcagaaattaatgcgctcagattactattcttcttaccatccgctccactagaaggattcagcaaatacagaccaataggaatagtaattgcgttaacaataatagaaataattgctaccactaaacctgtacttacggaatcaccataaataggatcgagaactgcaaaccccaggaatccaatggtaggactacctgcaattaatgcacatacagctgcttctgcatgggtacgtttaaaaaatttgtagcaaccgaaccaggagaaaaagaaacatccgacaataaccacaagacttacaagggtcagacgagtgtccgcaaaaatcatttccctgtttgcccgagtaatagatacaaatagagccgcaggaagcgcgtagtttaataccagtttattaaatgcccgagcttgatcttcactaaatgtttctcgtctgccgctaaaataacccaacagcatgattacgataataggcaataaatcgccaataaaaaatgttagcataatagtatttccgataagggtcccctcaccatcgcataatgagttggcaagaggagacgatgtcagtatttaattaccagcgacttgttttgggttaagtttggtaatatggccactttcagttcctgctgcagggtcgatgaccacattaataatggtcggtttgcggctctgaataccggtggttaaagcatgacgaagttcatctgtcgtggtgacgttatagccaacgccacgaaacgcatccattaatttgtcataccttgcatggtgcaacagatccgttggacttggtgcaccagcgccactgagatcaacaccgtctcctctgtagatgccgccattattaaaaataacgatcgtcaccggcaggttatatcgacaaatcgtttcaatttccatcccactgaaaccaaaagcactatcaccttcaatggcgacaaccggagaaccagaagtcacgctagcaccgatggcatagcccataccgatgcccatgacaccccaggtaccacaatccagacgacgacgtggtttatacatatcaataatatttcgtgcattatccagggtatttgcaccttcattaactaaataaatatcctggttctcgcgcaatacgtcgcgcacagcacttaatgcattaaagtaatttaatggttgagtatctgtacttaatttttcatgcattttttgtgcattttgctgcttgtggatatttaaaatatcgcgccataccagtggagtcgtaaatgtgttttgtttcagttctgccagcataccttgcatactggatgcaatatcaccaacgactggcacagcaatggggcggttgctgtcaatttcctgcggttcaatatccagttgaataaactgtgtatctgccgcccatccttttttaccgtgtgccaataaccaattcagtcgtgcaccaacaagcatgacaacgtcagcatttgccagggcaaagctacgcgcagctgccgcagaaagtggatgcgtatcttcaaggatccctttcgccatagacattggcaggaatggaatctgagcactttcaataaattcacgaagctgttcatcagcttgactatacgccgcgcctttgccaaggataattaatggccgttcagcttttgctaaaaggctaattgcgctagtgacactcttcgggcatggcaataatgctgggctcggattttcaactttaacaatcgtggttaacgcttcgtctttttccatcgtcgcggccaggacatttgctggcaaatcaagataaactccgccagggcgaccgcttacagagacccggatagcgcgtgccaatgcaatgccaagatcctgcggctgattaacgcgaaatgctgctttggcatacggttttgccgcattcatttggtccagctcttcataatcaccttgctgtaggtcgacgatcgcgcggtcgctggagccgctaatcatgatcatcggaaaaccatttaccgttgcgttggccaatgcggtcaaaccattgaggaatcctggcgcagaaactgtcaggcagatccccggtttttgggtaagaaaaccgcttgccgcagcggcatagcctgcgctctgctcatgacgaaaaccaatataacgaatgccttccgcctgggcatggcgtgccatatccgtcacaggaatacctacaacaccataaatagtgtcaatattattctgttttaatgcttcaacgatgatatgcataccatctgtcatttgaagttgatcactcatgattaataacctcgaaatttttataaattgggagccagaagcccccgttaatatcagatggcgtggttttgcttcattgcagcaatttcatcgtcgctataacccagctcctgcaatacagcagcggtatgttcacctaatagcggcgcagctttaatatccggcgtaaaggcagagaatttcattggacaaccaacggtcagatattttccacgcaacggttgttccacttcaacaacactgccactttggcgcaaagagggatcaagactaatttctttcatacttaaaaccggtgcacaaggaatatcaaactgagtcaaataggccaccgcttcatgtttatcaatagtgacagtgtatttttcgatttcagcaaaaatatcgaaaatatgtggctgtcgtgcatgggctgtactgtatgccggatcggtaatccattctggtttgccgatggctttacaggtgttttcccagttttgctcctgaatagtgaaataaatataggcgttaggatcggtttcccagcctttacatttcaggatccagccaggctgaccgccaccacctgcattaccaccgcggggaactgcatcaccaaatgtaccattcggatactgcgggtattcttccagatgacccaatttatcgagacgctgctggtcacgtaatttcacgcggcaaaggttcaatacggcatcctgcatactcatggtgactcgttgcccacgccccgttttttcgcgatgcagcaaagcagcaagtaaaccgatcagcaaatgcattccggtgttgctgtcacccaacgctgcagcgcttaccagcggcggaccatcccaaaaacccgtagtggatgccgcgccacccgctgcctgagcaacgttttcataggcttttacattcacataagggctacactcatcaaaccctttgatgctaccaaaaatcagacgtggattgatttcttgaatatgctcccaggtgaagcccatgtgatcaatggcccctggatgaaagttctcgactaagatatcagcttcgcggatcagcttttccattacctctttgccttccgctgttttggtatttaactcaatagaacgtttgttactgttaagcatggtgaagtaaagcgcatcgatatcaggaatatctcgcagctggtgacgcgttacgtcaccaacgccgggacgttcaattttaataacgtcagcgccaaaccaggccagcatttgagtacaagatgggccagattgcacaccggtgaaatcgagaactttaattccttgaagtggagtactcatagcaatacctattagttaattaaatatgtgttaatttagcgtttatttaaggcgtaatatcttctataaataacccgcaaaatatcgtcgtagctgcactcgatatttttaaaatcctgtatcaagtgctgaaaatcatttcatcgccacttccaattcctttctgcatggtaagtagtgaggacgaaaagaagaatatgataaatattgattcgtggtaatcagagagagtcgcgacatttgtgatgttattcttacaactgtaagaagcgccggtgatttacaagcaagggtatgattacgctttttaaagcgtaccataaaacataacataataaatgatttgtgatgacacgggattattgcggtttactttgaggaatataaaatgcgagtttatagcaccgcgagcgccaaataattttatgaccacaacctgtcgtattgtggtcataaaaaattgtcggctggagggagttaaatcctttacctcaatatactgcctgtcagcattagttcacaaacagtgcttcgctatcgacgatgattccatcttccgcacctttaagcgccaggtttgcctcgtagtattgctttttatcaagcagtttctgcgcatcagcaagtgcattacgagtctgtttaagtggcatcagatattggttttccattacgccaacaccggccaggcgaagctcttccattgcgccctttttatcccctttcgccattttttcattggcaatttttatcgcggcttctttttcgggagttgctacataactctcagaaattccgacagatgcattaatgacaatatattggtcatcattgagattggtctttttacctggcttagcgaactttgcccattcggtactgtcatcactcagcaaagcggaagcttcattggtcagttcttttgccttttctggatcgccatgaaacagagccaggcgcgctacctgcacgtcacgcatcgcatataaaccttgttcagagatacgctctgctgccgctgccgttttctgggtttgctgaacttgctgagtttgctgttgtgccgctaccggagcattatcagcagcccatacagtactagatgccagaattgctgtgaccatcgtggccataattaaacgtttcatacttacctcattctttaacagttttagaaaacgccgccatcatattgggtgagcatgaaatgagaaatcagagagcaacggtcattttgaaagggttatcttacagttgtagttattatcgcaagaagtattttagtcttacaattgtaggaatatgcttcctgtcgcagagaactattcttatataccacaaagagatgtcatttattatatcgatgtaaatactgattaattaaatgtaaatacagccataacatcgtaggttctcagtgaaccattttcaggataactttctatgaaagtaaacttaatacttttcagcttatttttattggtctctattatggcatgcaatgtttttgcattttccattagcggtggtggaagtgagaggagctataaagagactgaaaaaacaagtgcgatgacgaccacacactctacaaaacttcagccaagtcaggcgattttgtttaagatgagagaagatgcgccaccattaaacctcacagaagaaatgccgcccccttttccgacaaaggcgaattatcttattcatcctgtgcgataacgtctttcacatggcaggtgaacaatcatgtctgatgctgatgtgaacacctgcccaaatgagccatcctgacccattaccgcctgccataccccaccataaagcgaatcatcaagccacaagccggggcaagaaacataaatatccccgtcactagttcattaccgccagttaaccacatggtgaagtaataaatgagtgcagcgaggatcaccatgccgaagaaagaagagaccgcgcttaccacgttcagtacctgaccgatgtagccgcttacgcagacaatacacagggcgagaaacatccataaattaatcatagctcaacctcctgccgcgctaaaaaacctgtaacttcagtcactttaatagtaagacaatccttaacctctggcaatttttgctaagcatcaatgaaaacagcatgttaaatgcaagactgttgtgtacggaaaaatatttactttgcacgattaataatcagtagctgaaagcagtcagcgagtgataaagtacagataccgcattcatgctcctcgtggttatgtcctgactagtctttacactctttacaggaaccattgtcgtacatgatggcccaaccaattgagtgtaccgctgtcgacatggaatcttctgcgatacaacaattcgtatctacagaaggtaactatgtttccacaatgcaaattttcccgcgagtttctacatcctcgctactggctcacatggtttgggcttggtgtactctggctttgggtacagcttccttatcctgttctctgctttctcggcacgcgtattggcgcaatggcgcgaccattcctgaaacgtcgtgaatctatcgcccgtaaaaacctggaactttgtttcccgcagcattctgcggaagaacgcgagaagatgattgccgaaaactttcgtagtctcggcatggcgctggtagaaaccggcatggcatggttctggcccgacagtcgcgtacgtaaatggtttgatgttgaagggttggataaccttaaacgcgcacaaatgcaaaatcgcggcgtaatggttgtcggcgtccattttatgagcctggaactgggcggccgcgtgatgggactgtgccaaccaatgatggctacctatcgtccacataataatcagctgatggaatgggtgcagacccgtgggcgcatgcgctctaacaaagcgatgatcggcagaaataatctgcgcggcattgtcggtgcactgaagaaaggtgaagcggtatggtttgctcccgatcaggattatggtcgtaaaggcagctccttcgcgccgttctttgcggtggaaaatgtcgccacaaccaatggcacctatgttctctcccgtctctctggcgcagccatgttgaccgtaacgatggtaagaaaagcggattacagcggatatcgtttgttcatcaccccagagatggaaggctacccgacagatgaaaatcaagccgctgcctatatgaacaagattatcgagaaagagatcatgcgcgcaccggagcagtacctctggatccaccgtcgctttaaaacgcgcccggtgggagaaagcagcttgtacatttaacaaactgctcttactctttccctcctcaaatcggccataataacctcatggtttttatggcttttttcttaaggttttttccttcgctgaatatctaattattaccgtcagaaattaaactgtcgccgatatgagacacttgtaagttactaaaagtaaataagaaaatgcctcttgtctcgtttcagttttaggcgtacattagcgccgtctcgagcagtttagctcagaattctggggtgatgcccacggtaaaatacagggcttttaaggtcgctttgcccggtgtcaactcactgtatcaggtgtaatgaagtcattcaggcgtaacagtaattacgcggagagatgtaaagtgaaatatttctttatgggcatttcttttatggtcatcgtttgggccggtacttttgccctgatgatctaaaagcaaactgtgcaatgaaaaacaggagccatcaggctcctgtttgcatttctgacgacggtgtttattccgcgttttcgtgaatatgtttgctgctggcgggtagtaaaccgtcggcacggaacatcgctttaatccctctgatggcctgacgaatacggtcgcggttttcaatcagtgcaaagcgaacatgcgtatcaccatagtcgccaaagccaatccccgggctgacacaaaccttcgcttcgttaaggagcttcttggcaaattccaggcttcccatggccgcatatggttccgggattttcgcccagacatacatgctagccttcggcatttcaaccatccagcccgcttcatgcagccctttaaccaatacatcacggcggcgtttgtactgttcggcaatgtcgcgcacgcactgttgatcgccctccagcgccgcaatcgccgccacctgcaacggcgtaaaggtgccgtaatcgtgatagcttttaatacgagccagggcgctgaccagcgttttgttgccaaccataaagccgatacgccagcccgccatgttgtagcttttgctcagcgtaaagaactcgactgccacatcgcgtgcacccggtacctgcataatactcggcgctttccagccatcgtagacgatatcggcataggccaggtcatggaccaccagcacatcgtagcgtttcgccagcgccactactttttcgaagaactccagttccacgcattgcgcggttgggttactcgggaagccgaggatcatcatcttcggtttcggataactttcacgaatggctcgctccagttcgttgaagaaatcgacaccttccaccagcggcacactgcgtacctgcgccccggcaatcaccgcgccataaatatggatcgggtaacttggattcggcaccagcaccgtgtcaccatgatccagcgtcgccagcatcagatgcgccaggccctctttgctaccaatagtgacgatggcttcactttccgggtcgatttcaacgtcgtagcgatcctgataccagcgggaaatggcgcgacgtaaccgcggaatgccgcgactagtggagtaaccatgcgtgtccgggcgctgggccacagtacataatttttcgacgatatgcggcggagtcgcaccgtccgggttacccatgctgaaatcgataatatcttcgccgcgccgacgcgcagccattttcagttcagcggtgatgttaaaaacgtagggcgggagacgatcaatgcgcgtaaagcgacgttcagggcgagtgtcagccataatttcctcagattaacgttagcgcccggaccgtccgagcgacgctgccacgatggtggctgttttgaaaatagcctgattaatttctgtctgtccagtgttttagaacattttattaatgacgttaaatgaggaactctgctttaaaaacaggaaatttatctgcgctaacaagaaaattaccactcattctattaacataataatttcaataaatttactaaccagaagtgcattatcaagagatgcattgctaatacaccatttatctatcaatccccttttaaaattgtggtttttcctcaaaaacggcctgctggtcatcagccttcaggttacctatcatagaggtttaatccttattcagagtcacccgtgcacgaaatattcaacatgctgctggcggtcttcgatcgggcagcgttaatgcttatctgcctgttctttctcatccgtatccgcctgtttcgcgaactgttgcacaagagcgcgcactccccaaaagaattgctcgccgttaccgccattttcagcctgttcgccctgttcagcacctggtccggcgttcccgtagaaggcagcctggtgaacgtacgtattatcgcggtgatgtccggcgggattctgtttggcccgtgggtaggcatcattaccggcgtgattgcgggtattcaccggtatttaattgatatcggcggcgtgacggcgatcccctgctttatcaccagcattctggcgggttgtataagcggctggatcaacctgaaaatccccaaagcacagcgctggcgcgtcggtattctcggcggcatgttgtgtgagacgttgaccatgattctggtaattgtctgggcaccaactaccgcgttggggatcgatatcgtctctaaaatcggcattccaatgatcctcggtagcgtctgtatcggctttattgtgcttctggtgcaaagcgttgagggcgaaaaagaggccagcgccgcgcggcaggccaagctggcgctggatatcgccaacaaaacgctaccgctgtttcgccatgtcaatagcgagagtttacgcaaggtctgcgaaattatccgcgatgacattcacgccgatgcggtggcgattactaataccgatcatgtgctggcctatgttggcgtgggtgaacataactatcagaatggcgatgacttcattagcccgactacccgtcaggcgatgaattacggaaaaatcatcattaaaaacaatgatgaagcccaccgcacaccagagattcattccatgctggtgatcccattgtgggagaaaggggtcgtgaccggaacgctgaaaatttactactgccacgcgcatcagatcaccagcagtttacaggaaatggcggtcggtctgagccaaatcatctccacgcaactggaggttagtcgcgccgagcagctacgtgaaatggcaaataaggcagagcttcgcgccctgcaaagcaaaattaatccccattttctgtttaacgctctgaacgctattagtagcagtatccgtctgaatccggataccgctcgccagttgatctttaatctgagccgttatctgcgctataacattgaattaaaagacgatgagcaaatcgatatcaaaaaagagctgtatcaaattaaagactatattgccattgagcaggcccgctttggtgacaagctgacggttatctatgatattgatgaagaggtgaattgctgcattcccagcctgctgatccagccgttggtggagaacgccattgtccacggtattcagccttgcaaaggtaaaggcgttgtcaccatcagcgttgcagagtgcggaaatcgggtacgcattgcggtgcgagataccgggcacggcatcgatccaaaggtgattgagcgggtcgaagcgaatgaaatgccgggcaataaaattggcctgctgaatgtccatcatcgcgtgaagttattgtatggcgaggggctgcatatccgccgcctggagccggggacggaaattgcgttttacattcctaaccaacgcaccccagtcgccagtcaggctacgttattgctttgagccggagtgatattgtgaaagtcatcattgttgaagacgaattcctggcacaacaggaactgagctggctaattaaagagcacagccagatggagattgtcggcacctttgacgacggtctggacgtgttgaagtttttgcagcataaccgcgtcgacgccatttttctggatatcaatattccgagcctggatggcgtgttgctggcgcaaaacatcagccagttcgcccataaaccgtttattgtgttcatcaccgcgtggaaagaacatgcggtagaagcgtttgaactggaggcgtttgactacattctcaaaccgtatcaggagagtcgtattaccgggatgctgcaaaaactggaagcggcctggcaacaacagcagaccagcagtacgcctgccgcgacggtaacgcgtgagaatgacaccattaatctggtgaaagatgagcgaataatcgtcacgccaattaacgatatctattacgccgaagcgcacgagaaaatgacctttgtctatacgcggcgtgaatcctacgtaatgccgatgaacattaccgaattttgcagcaaactgccgccgagccattttttccgctgccatcgcagtttttgtgtcaatctgaacaaaatacgcgaaatcgaaccgtggtttaataacacctacattctgcgactgaaagatctggattttgaagtgccggtcagccgcagcaaagtgaaagaatttcgccagttaatgcatctttaatcgggaactttcatgaaagcaccaggcttgcccgccgatcaacaatttttcgccgatctgttcagcggcctggtgcttaacccgcaactactggggcgcgtctggtttgccagccagcctgccagcttgccggtgggcagtttatgtattgattttccccgtctggatatcgtgctgcgcggcgaatacggcaatctgctggaagcaaagcagcaacgtttggtggaaggagaaatgctgtttattccggcgcgcgcggctaatttaccggtcaacaacaaaccggtgatgctgttaagcctggtgttcgctccgacctggcttgggttaagcttttacgatagccgcaccacgagcttgttgcatcctgctcgccagatccagcttcccagcctgcaacgcggtgaaggtgaagcgatgcttaccgccctcacccatcttagccgtagcccgctggagcaaaatatcattcagccgctggtgttaagtttgctgcatctttgccgtagcgtggtgaatatgccgccgggcaatagccagccgcgcggcgattttctctatcacagcatttgtaactgggttcaggataattatgcccagccgctcacccgcgagagcgtggcgcagttttttaatatcacgcccaatcatctgagtaaactgtttgctcagcatggaacgatgcgttttatcgagtatgtgcgttgggtgcgaatggcgaaggcgaggatgattttgcagaaatatcatctgagtattcatgaagtggcacagcgttgcggttttccggatagcgactatttttgtcgcgttttccggcgtcagtttggtctgacgccgggagagtacagcgcccgttttcagggctaacgtcagaaggttaattctgtttccagcagcgtcaggatactttgtgcatcttgcgcggcaaacaagctctggcggaagtttttattcaccagtttacgcgccagctggctgaagactttcacatgattcatcccttcgttagcacccagcgtcagcatgatcaccagttcgacttcgcccatttcactctgccagccaatcggtttcgccagccgggcaatgctgatactggaatgacggatccactgagatttggtgtgcgggatcgctacgccaaaaccaacgccggtggtaacaatctcttcccgctgccagacatcttcttccagctcaaacggatgttcagtgcgcccgttaacgccgaggttgccgcacaggaactggatcgcctgctctttattgctaaaatcctgatcaacaaagatattctccagcgccagcagtgggcgaacgtcttcttccggcgtaaaggcggtgagtaacgcttcaatttcctgcgcactgcggcattcacatgcctgacgcgccagttcccgacacgcctcgctatccagttgacgaagctggcttttcaccgccggaatacgcgggctactcatactcagctcatccaggcccagcccaagcagtagcggcagataacggctttcaccgcccagttcaccgcaaatgcctacccatttgccccgctgatgcgcagtggtaactatttgctgcaacatgcgcaggaagcttggcgtaatcgggttatatagcgggcttacgcgcgggttattacgatcgaccgcatacagatactgggtcatatcgttggagccgatactgaagaaatcgacctcatcgcagaagtggtcgatgatgtagcacacgctcggaacttccaccatgatcccaagcgtaatcgtctctgcatgacgcaggccatcgcgcttaagctcaacgatcgctttttggatctcgcctttcacccataagatctgatcgaggctgtgaaccatcgggatcatcaactgggcgttgccgaaactggcggcgcgcaaaatggcccgcagttgagtgcggaacaggccagcaaattccgggtaaatacgtaccgcgcgatagccgaggaacgggttctcttcctggggaatattcagataaggaatgcttttatcgccgccgatgtccatcgtgcggaagataatcggcttgtcgcccgccgccagtagcacctgctggtaggcttcaaattgctcctgctcgtccggcgcgctgtcgcgatccatatagagcatttcggtacggaacagcccgacaccttccgcgccgttggcaaacgcgcctggcgcttccagagcggtgccgatattcgccgcaatatcaatacgcttgttatcacgggaataggccagctgcgcggcagcctgcgcctgttgtttttggcgtttatccgccagcgtctgcgcgacctgataataaccgctcaccgcgtcattcgggttaatcgccagcacgccgcactgggcgtcaagcactgcaggttgcccggcataacgggcaatcgcatccagcggcaagccactcagtaccgggatcgcgctggcacgggccagaatcagtgtatggctggtgcgcccggttttctccagaatcatgcccgcaagatttttcaaatcaaggctcaaaaactggcttggggttaaatcttcagccaccagaatggtcggtttttcaagcaccagcttgttgcgcggcttcagttccggccaggtgatatgcagcaactgttcgctgatatcgcgaatgtcgctaacacgttcgcgcagataatcgctggcagaggcagaaagtttggcgcaaacctgctccatattgctgatgatcgccgcccccagcccctgatgctgttctgtcatcaggcgacggatattgcctgcaaattcatcatcctgaatcaggctcaaatgggcgctgaggatagttttgctttcgccgtcacgctcacgcaattgctggttcagttgctcggcaagcgttgccaggctgtgctccagccgggtggaatcttgcgcactggcggggattgcccgataactgtcgaggctgtcgctttgtaacagggtcagcgtacccacgccgacgccgcttgccagcacattgccgtacagtaaatccgggttaaggcggcttaaactacgcggcagcggatgcgccgtcagttctgcctgcgtaggctgaacgctgtcgctgtcgataaagcgcacctggatgtactcttccagcacgcgccgcgcctgctcttcatcgctgccgctaatgttcaggctgcaactgtcattaaatagggtgccggtgccaatcagcgccaggctgcttttcgcatctgcctttgcgttctggcgatggttaataaaagtgatttcgctttgccactggctgcactgttctttaagttcccacgccggacgagcatgtagaccgttaggcaaaggacagagaaattgaatcgttaacataaccgctccgggttaatcaggagatcatctgaaatccgtcagttgaacaaccgtctcacgcgtaagacgttgaataagggcagataaaagttgctgcatctgcaaaatgtcgcggcaatcggcaatgcttgcggcgcaatgtccatggcgggttgctggccccatcaccactgtgggcacgccggtgccggttaagtgcaccgccccgccgtccgtgccgccgttgctgaacatatctgcctgcaacggcacgccaatttctgccgccacggtttcgacccaggcggtaagttttggcggcgcaatcaggctcttgtcgcttaacaccagcatcggcccgttaccaatctggcgatggttagccgcgccataatcaaagtttttcgcccagcaggcggtatcaagcacaatggcgacgtccgggctcaccgcgcgggtggcagtttgcccgccgcgtaatcccacctcttcgctggaacttgccaccagccacacttccgcaggtagttcggcgtcgtgcagttcgcgcagtaacgtcaccagcagatagcaaccgaggcggtcatcaaaggctttccccatcactcgctggtgagggagaacctgaaaagtggtatcaaacgtgacgcgatcgccgggacgaattcccgcctgcatcacttcgtcataggagcgcgcaccaatgtccacgcgcatggcgctgacgtcattcccctgccggtcgccgtcaagcaggcctggaattttgcactcttcacgggtggtgatgcgcaccggctgcagctggcgggcagccatgcgtacgttgccaaccggcagcacatcaatcgccccttcgcgggagatgctgcgcaccataaatcccacttcgtccatatgcgcacagatcatcaccttcggacctgtgctttcattcaggcggatcagcacgcttcccagaccatcaaatcgcacttctttttgcaggcgatccgcttcttccagcaggatctgccgcacttcctgttcgctggaggcgatcgcatctgcctcgctcaacgcttttaataggcttaaatccattatgcctctcccgtgagcaacactgttttcggcatggcgtagagcacttctgcgccttgcggggtaaccagcacaacatcttcgatgcgcacgcccccttgccctggcaaataaatccccggctccacggtcagtaacatgcctggctgtagcgtcgtggtgtcccgcggactaaaacgcggatcttcatgaacttcaatgccgatagcgtgaccggtgttatgaccgaaatagtcgccataacctgcttctgtaatgacccggcgcgcggcatcgtcaacctgctggcagcgcacgccggggcgaatcgcggagattgctgcgagctgtgcctgcaggacaatttgatagacgttaaacagcaggtgagattcggcgctcaccccttcgccattcaccagcaaggtgcgcgtcatatcagagcagtagccctgatacagcgcaccgaaatcgagagtgacaaactcgcccgctgcaacaatcttgtcgctggctttgccgtgcggcagcgccccacgccagccactggcgacaatggtgtcaaaagaggctttttctgcgccctgctggcgcataaaccactccagttcagcggctatctcgcgctcgctcatccccgcctgaataaagcggcgaatatgctctgcaccgcgatcagcaatcccacaggcgaggcggattttctccacctcctctggcgttttgatttgccgcagcacatccggcgtggcgctaaccagtttcgcattgagttcagactgccagcggtgcgcggtttcccaactcacctgctggccctcaaaaccgagcgtttgcaactgttcatcggcaatgatttgattgacgatagtggtaagcgtgttcgtcgcgtcaagcaaatgcagctggtagccttgcgcacgggcttccacctcaacgtaatagcggctatccaccagaatgtgcgcactttcacggctaatcaccacataaccacttccggtggagatccccagatgcggctgtttgttctgccgactggagagaagcactgcatccagttgttgcgccttaagccagtcgcgcaggctagcgagtaatgtcatctggattttccttcttacaggctatcgattaacaatttgcctttacggaacatcatcagacgcaggaacaccaccatcagcgcagttatgactgcccccagcgcgatccccgccatatagacgcccaggttagtgaccagcggccatgcccagatagcggactccgggaaccattgcactgcgcccagccagacagcggcggtactgccgacaatagcgccgaccatatagctcggaatggcggtgatagggctttccagcgcaaacggaatcgcaccctcactgatccccataaacgccaggaacatggcggtcttaccctgcggataaagttgagcgttgaacaggcgtttgccggttaaacgacggtcgataatggtcgccagccccagaccaatcggcggaataacgatagcgatagaacgagcggtgaccggtaatacgtggtcagtggtaaagctgaaggcaacaaaacctgcggctttgttgatcgggccaccaaggtcgattgctgtcgccgcggcgatccccattgcgtacatcagcgcgcccttctcacctgcggcagtcagcacagtacggataccgccgttgatccagccaccaaagggggtgatgacgtagtacatcgccagcatgacaaaaatggcggaaagaatcgggagcaaaaatgtggttttgaacgctaacaggaaatccggtaactggattttctggttcatccacttcacaaggtaaccggcaacgatagaaataatcagcgcaccaatgaaggtggacggcaccgggctagaggtcgcccattgcatagtgctgggatcgaagttcagcagttgcgtcggctgggtagacatcaacccgccgataaaaccagccgggaacgccagtttgccaccgatagagttcgccacaaaagcagcaaacatcggaatggcaaaaccaaacaacacgccgccgaaggactggctcagccaggcaaatttaagtaaggagaggtcgaaaccggagaatttcccgctattaagagcatccatgatgccgatctcagcaggaattttaagccagctataagcaatcagctggctgaaagcgaggatcacaccgcccataattaaggtcggcaccatgcgactaatcccactcatcacatgctgcgggagttcaccccagaagctggttttagaggcctgcggattcttaactgccgctgccgcaccggatgcgccaggcacaacggttgcactgcgttttttaatggccataacaattatccctgtcgaatattactgttgttcagaggcaatcatctcttcgatttctttgatgatgcccgcagcgtttttaattgcgtcctgcaaagtgatttcataaacgtcgcgactttcgaaacgttcgttatcttccggggtaactgccacggagtggatgatgatggtcgcttcggcgatatcctgcgccgtcaggcgattctggataccgtccgcgccctgggtttcaattttcacttcataaccggcttctaccgccgcttcttccagcgcctgagcggccataaaggtgtgagccaggcccatcgggcaggcacataaggcaatcagtttcttactcatcgttaattcctcgttcagtgatagttgacgagtgaaattatgaacgtgcaaaacaaatcgccgttaccagacaaataatgcatttactggagaattaatcccgctgtacggaagtgtgacgcaggtcgaccttgtgaggggacacaaagaaaaattgaataaactgtatgatttaaaagattatcgggagagttacctcccgatataaaaggaaggatttacagaatgtgacctaaggtctggcgtaaatgtgcaccggaaccgagaaggcccggattgtcatggacgatgagatacaccggaatatcatggacatattctttaaagcgccctttatcttcaaatgcggcacggaaaccggaggctttgaagaactcaaggaagcgcggcacgataccgcccgcaataaacacgccgccaaatgtcccgagattgagcgccagattgccgccaaaacggcccataatgacgcaaaacaggctcaatgcgcggcggcaatcggtgcagctgtcagccagcgcgcgttcggtaatatcttttggcttgagattttctggcaggcggttgtcagctttcacaattgcgcgatacaaattcaccagcccagggccagaaagcacgcgctccgcgctaacatgaccaatttccgcacgcaatatttcgaggataatggcctcttcttcactattcggcgcaaaatcaacgtgaccgccttcgcctggcaagcttacccaacgcttatcgacatggaccagatgcgcaaccccaagccccgttccggcaccgtaaaccgcaataggcttaccttcgaccggttctgcgccaccaaactgaatcagatgctcttttttcagcatcgggatcgccatgcttacagcggtaaaatcgttaataatttccagatggctaaaaccgagattctttttcatttcggcaatactgaacgcccaggtatggttggtcatcgccacccagtcaccggtaattgggcaagcgatggcaatacagccgtctttcacctcgaccttatgttcttcaagataaacgcgaatgaccgcttcgaggctggggtaatcaagcccactataggtcttagcctggctgatttcaccactggcaatatcacacagagcaagacgtgcgttggtgccgcccacatcaccgactaatgcatactttgtcattcttcaactgctccgctaaagtcaaaataattctttctcacactgtaaatacctgggggcataacaacaacgccggaaaggcaggctccctgtaaatatcgatctgggtcacacaattactttatcgtttcagcaccaattgcagcgatgcctttttgcaagctgggcaaactaagtatctgaccccgcataaggaatagaacacaggcggcactaacccggacgtagactgtattacaaaagcggcaaaaagcagagacaaaaaacccccgctttgcagcgagggttggaaatttggtggagctaagcgggatcgaaccgctgacctcttgcatgccatgcaagcgctctcccagctgagctatagccccacgatgcgtttacgtaccaagtttgctgggtgcaaaatttggtggagctaagcgggatcgaaccgctgacctcttgcatgccatgcaagcgctctcccagctgagctatagccccgtcacgtaaagcttgtcgagttgacgggcggcatcatatgaattccgcccgaatgtgtcaacggcaaattgcaacgtgtagtttcaatcgctgaaaaatcaggcaaatgaacaattttggaaaaccgctcgcattcagtagttattcatgtcacggtttcctgtaaagtggtgttataaaatgaactactaatagacccacatacattcagggaattgttatgttcaaggagaggatgacaccagatgaacttgccagactgaccggctatagccgccagaccattaataaatgggtacgcaaggaaggctggacaacgagtccaaaacctggcgtccagggtggcaaagcccgactggttcacgtcaatgaacaggttcgtgaatatattcgcaatgctgaacgtccagaaggtcagggagaagcgcctgccctttctggtgatgcgccgcttgaagtattgctggtgacactggcgaaagagatgacgccagttgaacaaaaacagtttacatccttgcttctgcgggaagggattatcggattgttacaacgcttagggattcgcgatagcaaataatatgaaaagattacgcaataaaatgaccaccgaagaactggctgaatgcctcggtgtggctaaacaaactgttaaccgttggatcagagaaaaaggctggaaaacggaaaaatttcccggcgtgaaaggcggtcgtgccagacttattctggtcgatacgcaagtttgcgagtttattcagaacacgccagccttccataacacaccaatgttgatggaagctgaagagagaattgctgaatacgctcctggagcacgcgccccggcgtatcgacaaatcatcaacgcgatagataatatgacagacattgagcaggaaaaagtcgcgcaatttttgagtcgtgaaggaattcgcaatttcctcgcccgtctcgatattgacgaaagtgcataaataaaaaacggcaggatattatctcctgccgtttatctttttacacgctaattactgctgattttcgcgttcagcaataaaatccagcgctttgttgatacgctcgatactgcgggtcttaccaattgcgtgaacggtaacatccagtgctggagactgccccgcaccggttacggcgacacgcagcggcataccaactttacccatacccacttccagctcatccgccgtcgcctgaatagcgtgatgaacgttttcagcggtccagtcagtaatcgcggccagtttgtcacgaaccacttccagcggctgacgcgctaccggacgcagatgttttttcgcggcgtcggcatcgaactcagcaaaatcttcgtagaaataacggcagctctgtgccatctctttcagcgtcttgcagcgttcgcccagcagtttcaccagatcagccagctgcgggccgttacgggtatcgatattttcctgctcaatgtgccactgtaagtgagtagcaacatactccggcggcagcgcgttaatgtagtgatggttcagccacagcagcttgtcggtgttgaacgcactggcagatttgctgacggcattcaaagtgaagtatttgatcatctcttcacgagtgaagatttcctgatcgccgtgggaccagcccagacgcaccagatagttcagcagtgcttctggcaaataaccgtcatcacgatactgcattacgctgactgccccgtgacgtttggacagttttttaccgtcatcgccattgatcatagaaacgtgcgcgtaaaccggcaccggcgctttcagggccttaagaatgttgatctggcgtggcgtgttgttgatatggtcttcgccacggataacgtgggtgatttccatatcccagtcatcgacaaccacacagaagttataggttggggaaccatcggtacggcggataataagatcgtccagttcctggttgctgaactcgatcggaccacggatctgatcgtcaaaaacaacagaaccttcctgcgggttagcaaaacgtacaacacacggttcatcatcagcatgatgctcatggctgtggcggcagcgaccgtcataacgcggcttctcacctttcgccatttgctcttcgcgcagcgcttccaggcgctctttagagcaatagcatttataagcagtgccctcttccagcatctgatcgatcaccgcgttgtagcgatcaaaacgtttggtctggtagtacggaccttcatcccactccaggctcagccagttcatgccatccataatggcttcgatagcttccggcgtggaacgctcaagatcggtgtcttcaatacgcagcacgaactcaccgccgtggttacgtgcaaaaagccaggagtaaagagcagtacgcgcgccgccaacgtgcagatagcctgttgggcttggcgcgaagcgagttttgattttcatgaaatggccttacgtttagaaagatgccgacaaccggcaaatcctggaaaaattaagtgggcgatattctatcactcccgcctgattcctcaatgtagttcgggtttctaccttacgcattattgttttcgttgacaaattgcgcaacacggtctgttttgcgatcatcttgcttaaatttacgacgaacgaacaatttctttagaaaatgcgttgactcattttgaactctccctataatgcgactccacacagcgggggtgattagctcagctgggagagcacctcccttacaaggagggggtcggcggttcgatcccgtcatcacccaccaactactttatgtagtctccgccgtgtagcaagaaattgagaagtgggtgattagctcagctgggagagcacctcccttacaaggagggggtcggcggttcgatcccgtcatcacccaccactttctcgccagctaaatttcttgtaaaaatgtgaagtaccgaagtgggtgattagctcagctgggagagcacctcccttacaaggagggggtcggcggttcgatcccgtcatcacccaccacttcgggtcgttagctcagttggtagagcagttgacttttaatcaattggtcgcaggttcgaatcctgcacgacccaccaatgtaaaaaagcgccctaaaggcgcttttttactatctgcgatactcaaagattcgaacctgcagcaggtttgagttgagcgcagcgaaacaacggagccgctcgtgctggcgacggcccgaagggcgagcgaagcgagtcatcctgcacgacccaccaatgtaaaaaagcgccctaaaggcgcttttttgctatctgcgatttgcgaaattgcctgatgcgcttcacttagcagactactatttccggcaattcctgtctcctcacttactgtgtcaatgcagccaacagcttaaccatcgcgggcgtcacctgctgtgtttcataaacaatatataaatctgcagggatgcgctgtttgagcggacggaaaatgacacctggccagttcatttgtgcgtagctgtccgctatcaatgtgataccaatgcccatactgaccatagcgagtaccgtttgcggttcattaacttcgcgaataacaaccggactaaatcccacctgctggcaaactcgctgcaaaaaatcccagtcagtgtaaacgggcggcattgtaacaaaatactcgtcacgtagcgcttccagcgggacggtggaaaaactactgagatgatgctcttcaggcatcgccaccagaaacgcgctttcatgcaaccgtaagctggtaaaaccagtcggtggttctgtcgccattcgccagatcccggcatcaagttcgcggcgttccagcaaggccatttgcatcgcgggcatcttttcgcgaaaaagaacgtcaacgttaggattttccctgaggaatcgccgcataaccgggcgcatccgtccccacattgccgttcccactacgccgagttcaatccgccctgcttctccccgacctatttgttcaatccgagccaatacattattagcattcaccagcaatcgacggctttcttccatcaagattttgcccgcgtgtgtcagtacgacgctgcggctatggcgaataaaaagctgcgtgccgagttgattttccagctctttaatatgaatgctgagcggaggctgagacatatttaaacgcgctgctgcgcggccaaaatgcaactcttccgctacggcaagaaaataacggagcaacttaagatctgttctgtatacgcgttccataattaagtgctccatataataaatacatcgtattaaattatcatggcataaagtatttcaccaccagatatccgacatacataaacacaatggataatatacccggtaatacatttggtacaggaataggcaagcgcacgattgtaaacaaagcaccaataccaaaaccaacgccggaagaaaataaaatatctttcactaattaacctttatcataaaagcagctctgaagagcagagccgcgaatccttttaatgagtcaccgctcgatgctttatcttttcagggtcatgattatatttaaacccaaagaaaaatatcactgcgagaaaaagagcatatcctgcaaacaccagccagatagtttgccagtcttttacgccatccacgctaaagtaatctactgccatgccactcagaatgctgccaacccatgcgccgacaccatttaccatggtcataaagagcccctgcgcgctggcacgaatgctggaatcaacttcctgttcgacaaatacgctaccagaaatattgaagaaatcgaatgcacagccataaacaatcatgctcagcagcagcaaaataaatccggttgtactcggatcgccataggcgaagaagccaaagcgcagcgtccaggccaccatactcatcagcatgacggttttaatgccaaatcgctttaaaaagaatgggatagtcagtataaagcccacttctgccatctgactaacactcagtaaaatggagggatatttcaccacaaaactgtcagcaaactccgggttacgggcgaaatcatgtaggaacggattaccaaaaacgttggtaatttgcagtaccgcacccagcatcatggcaaagaggaaaaagatggccatgcgtggatttttaaacagcacgaaggcatccagacccagcttgctggcaaggcttgtggtcgcttttttctccgcaaccggaatcttcggcaaagtcagcgcataagcgctcagcagcaaactcgcaccggacgcgatatacagctgcagactactcaattccagatgcagcaggcttactgcccacatcgcgacaatgaaccccaccgtaccaaaaacgcgaatgggcgggaaagcggtcaccgggtcaagccctgcctgggcaagacaggaataagagacgctgttgcttaacgcaatagtcggcataaacgccatcgcattgactaacatcacccaaaacatcatatccggatcagttacggatgccgcataaaaaagtacgcccgcacacaccaggtgacacagcatgtatgcacgttctgcgcgcagccatttgtctgcgatgatccccattataccaggcataataatcgcggcgatccctttggaactgtaaaccatgccaacattagcgccggtgaaatgaagagtattaatcatgtaagagccgagggtaaccagccagctcccccagataaaatattgcaaaaaggacattacctttaagcgcatcgcgatgctcataatcgtttccttgtcgcatcatttggcctcacccgcgaggccgtttcttattgtttttctcaggcaattttgcgcagaaagccacaaataaggttgatgaagttctgcttagagagctccgcagccgccagcgtttgcgcatgactcaatttcacatcgcttaaaccttccgccatattggtaatcgcagagaccgcaacgactttaaggtcgcaatggcgagcactaataacctcaggcaccacagacataccaacaacatccccaccaataatttgcatcatgcgaatttccgccgcagtctcgaaattcggccccggatagctgacgaacacgccctccgtcagagggaaaccctcctctttcgccactttttgtaacagtgcgcggtattccgcatcgtaggcatttgccagactgaagaagcgctctccaaaacgatcatcgttaagacccaccatcggcgtaccgggcatggtgttgatatgatctttcaatgcgaccaggctgcctgcccccacttccggacgcaggctgcctgccgcattggtgcagaacagtagctcgcagcccagcagcttaaaggtacgaattgcgtcagtcataatggtcattccacgaccttcgtagaaatgtccgcgacctttcatacataccaccggtacgccctggagatggcccagcactaactcccccgcatgaccatgtaccgtacttaccgggaagcccggcagcttttcgtaggaaattgcgacagcgttctcaatctgatcggccagcgcgccgagcccggaacctaaaataaaggccactcgtggcgtgaaatcaggtttataagtcttgataatatctatgcaaaacagcgggttatgagaaaattgaacctgagacatacatatcctttttctgtagggtggaatctaacgcctttttatagcgaggttgtcccggctcttaccaatacacttttctcacgcattcaatagcgattcgatatcgatggatttatatcttttttctattaatccacggtaaaaactgtattggcgatattaattcctttgcattaacaatatgtcgtttttagcaaaccactttattaagcaatctactaataacgatcggcatagggaattatgctatgaaaaaacatcttttaactctgacactttcctctatattagcgatacctgttgtatctcatgcagaatttaaaggcggttttgcagatatcggcgtgcattatctggactggaccagccggactaccgaaaaaagcagcaccaaaagtcacaaagatgattttggttatcttgaatttgaaggtggcgctaactttagttggggagaaatgtacgggttcttcgactgggaaaacttctataacggtcgccataataaaccaggtagcgagcagcgttatacctttaaaaataccaaccgtatttacctgggtgacaccggatttaatctctacttgcatgcgtatggcacctacggttctgcgaatcgcgtgaatttccacgacgatatgttcctgtacggtatcggctacaatttcaccggcagcggttggtggttcaaaccgttctttgctaagcgttatacagatcaaacctattacactggcgacaacggctatgtcgccggctgggttgcaggttacaactttatgctgggcagcgagaaattcactcttaccaactggaacgagtacgagtttgaccgtgacgctacctatgcagcgggtaatggcggtaaagaagggctgaatggcgcagttgcactgtggtggaatgcaacaagtcacattactacggggattcagtatcgatatgcggatgacaaactgggcgaagatttttaccaggatgcgataatctactccatcaaatttaacttctgattgattactgccggggctcccggcagtatgaattcactttatatctgatacaacggatccccttcccgcccagccattagcgcattgccctggtctcgtaccacgtcccataaagcttcagcggcggtggaaagactacggttcttcctgcgcaccagcatcaactggcgttcaacaaccggcgtaatgcgctttaccaccagtgggctaccttcaggcaatggtagcgccagtgcgggaagaatactgatgccgatgcctgcggctaccatcgggaacagcgtcgccggatgtccaatctcctgcacaatattcgcctgaataccattgcgcgccagcgctgcgtcaatcagcggtcggctgccactcgcgtaatcctgcaacaccaatttcgctccctgtaatgcctgccagggtacataatcttccacggccaaagcgctatcgcgatggcaaagcagaaagaaaggctcggaaagaatcgcttcacattgcagatcgcccactgggcctggatcgatgacgatgccaaaatcgacatctccctggcgaatactttccattacccactgctgcggacgatcgtgcaggacaaactgaatatctggatagcggcgatggctttcagcaatgcattgcggaataagatgcgcggaaatggtctggctggcagcgacccgaacttttccgctcagttgttgccccatacgcccggtatcgcgcaacgtgctgttcagttcatccagcagtcgctcaagacgcaaagccagctgctgccctgcatctgtaagcaccacttcacgcgtggttctgtccagcaggcgaacaccagtatgattttccagttccttcacactgtgactcactgcgctctggctcaggccgatacgctctcctgcacgactaaaacttttctcctgcgctactgtgacgaaaacctttaattgttttaaagaataattcatctgttttcttcatgaatggatgcaataaatcaattttatttctcaaactggaagaagcacaatagaaccatcgatcatctggagtctttatgaaactttttcgtatcctcgatcctttcaccttaaccctgatcacggtggtgttgctggcctctttctttccggccagaggcgatttcgtccccttctttgaaaatctgaccaccgcagctattgccctgctgttctttatgcacggcgcgaagttgagccgtgaggcgattattgctggcggtggtcactggcgactgcatttgtgggtaatgtgcagcaccttcgtgctgtttccgattctgggtgtactgtttgcctggtggaaaccggtaaatgtcgacccgatgctctactccggttttctctacttgtgcattctcccggctaccgtgcagtctgcaatcgccttcacgagtatggcgggcggtaacgtcgcggcagcggtttgttctgcgagcgcatccagcctgctggggattttccttagtccattgctggttggtctggtgatgaatgttcacggtgcagggggcagccttgagcaggtcggtaaaattatgctgcaactgctgctgccgtttgtgttggggcatctttcccggccgtggattggtgactgggtgagccgcaataaaaaatggattgcgaaaactgaccagacgtccattctgttggtggtttatacagcgttcagcgaagccgtcgttaatggtatctggcataaagttggctggggaagtttgctgtttatcgtggtggtcagctgcgttcttctggctatcgtgattgtagttaacgtctttatggcacgccgactgagcttcaataaggcagatgaaattactatcgtcttttgtggtagcaaaaagagtctggcaaatggcatcccgatggcaaacattctgttccccacaagcgtgatcggtatgatggtgctgcccctgatgattttccatcagatccaattgatggtctgtgcggtgctggcgcgtcgatacaaacgccagaccgaacagttacaggcgcagcaggaaagcagcgccgataaagcttaaagcggacgcttcaggggctggaccagttgcgtcagcccctcggttttaatcagcagcgtgatttgcattagctcaccgagcttccctgccgggaactcatctttgcgggcaaaccacagcagatactcctccggcaggtcgattaagcgacgccctttgtatttgccaaacggcattatcgtattggctatttcaatcagctgctctttttccatctcagctacccagcaaacgcagcatttccgcttcgtcgatgacttcaatgcccagttcctgcgccttcgccagtttagatcctgcagcttcacccgctatcaccagatcggttttcttgctcacgctgcccgcgactttcgcgcccagttcgaccagtcgagctttagcgtcatcacggctcatctggcttaagctgcccgtaagcaccacggttttaccagcaaacgggctgtcaatctcttccgcgttgataacgatcggcgcaggccagtgaacaccttccgccaacagctcgctgatgacattgcggttgctttcttcggcaaagaagttgtgaacgtgggatgcaacgacaatgccaacatcaggcaccttttgcagctcttcaatgctagcggcttccagcgcttccagcgtgccgaaatatgccgccagacctgctgcggtggcctcgccgacttcacggatgccaagtgcatagaggaagcgagcaaaggtggtttctttcgctttttccagcgcgttaaccacgttttgtgcgctttttggccccatacgctccagtccggtcagtttgcctgcggtgagtttgaacagatctgccggagtatggacatattctttttcaaccagctgatcgatgattttgtcgcccattccgtcaacatccatcgcacggcgggaaacaaagtgtttcaggctctctttacgctgcgcaccgcaaatcaggccaccggtacagcgggcaaccgcttcaccttccacacgctcaacgtcagaaccacataccggacaatgcgtcgggaatacaacctcacgggtatcttccgggcgttcagaaagcacgacgttaaccacctgcgggatcacgtcgccagcgcggcgaatcaccactttatcgccaatgcgtaaaccaagacgttcgatttcatccgcattgtgtaaggttgcgttactcaccagcacgcctgcaacatggacaggttccagacgcgcaacaggcgtaatcgcgccagtacgcccaacctgaaactcgacgtcacgcacaaaggtcatctgctcctgcgccgggaatttaaacgctaccgcccagcgcggggcacgcgcgacaaagccaagctgctcctgctgtgccagactgttgaccttaatcaccacgccgtcgatatcaaagcccagcgtcgggcggtcttcttccactttgtgatagaacgccagcacttcttccgcgctttcacaaagcgttacccgatcgctgaccggcaacccccactttttaaattgcagtaaacggccaagatgagtatccggcagctcgccaccttccagaacaccaacgccatagcagaaaaaagtgagcggtcgcttcgctgtaatacgcggatcaagctgacgcagactaccagctgccgcattacgtgggttagcaaacactttcccgcccgtgcgtcgcgcatcttcgttaatcttttcgaaccccgcctgcggcaggaacacttcaccacgcacttccagacgcgccgggatattctctccgtgcagcttcagcggaatggcgcgaatagtacgcacattagacgtgatatcttccccggtggtgccatcgccacgggtcgcggcactgactaaaacgccattttcatacagaatactgacggcaagaccatccagcttcagctcacagcaccaggtgactttctcgttgtttttcagacggtcctgcacacgtttgttgaaagcaagaaagctttcttcatcaaaaacgttatccagactcagcattggtacttcatggcgtatctggctgaaagccgccagcggcgcagcgcctacacgttgagtagggctatcaggcgtaatcagttctggatgtttggtttccagctcgcgcagttcgcgcatcagcctgtcgtattcagcgtcgggaatttccggcgcatccatcacatgataaagatattcatgatggcgaagcgtcgttcgcagttctgtcagttgttgttcgatactttccatatcgcaccatcaatgctaaaaacccccgacaagcgggggttcgaagaggagttaatttgccttaagtgtatcaggcgttggcgtctttgacttcgcggatgatgtcctggtactcgcgcaatttctgcggagtcatcatacggcgctgatcgtcaagcacgacaccgcccacttcatcggcaatatgctgcgcagattgcagcatcagcttgaagttctgcagctcgtcaccgtaagacggtacctgcataaagatagtgacacccggagtagtgaaatccttcatttcaggatcaaaggttcccggtttcaccatattcgccaggctgaataacgccgggccgctgccatccgggctaagatgacgatggtaaatattcatatcgccaaaaatgaagcccgcttgttgaatgctgttaagaagcagttcaccgtttagctcgctaccgtgatgcgccgcgacgttcatgataatcaccgcttctttgcgcttcggtttatccataactggagcaggttccgctacaggctcaggctgtggtgccgctacgggttctgcaggctggaaagcctgttgtgccggttgcggtgcactatgcacaggctgcggcgctggcgcgacctgtgggctaactggctgctgcaacggctgttcaggctgcggctgataggcaggctgctgcaccggctgcgctggatgcggagcatgttgcggcggtacctgcgcttcaggcggctgctggaccggttgacgcggctgcgcagacgcataaggcggttggtactggtgttgcgggctcggacgagcagcctcatgctcctgagcgttagccggggcatgattcacgcggtgaacacgaacctcaccaacgccctcatcatcttcgacatcctcgtcataagaatcgtcgtcacgtttactcttcattcgttttaatggccgatcgcggaacatagaagatcgttctttacggctggtccagaaaccatgtaccagtaaagcgattatggcgatcgcgccaacaatgattaatatcagacgcaaatcctgcatcattatattctctgttgttctaacaccttgccaccacggcaaacatttactcactaagagtatttgccgattacctcaagtgcaagtgcactattaactttcacagcacaaagatagatgaaatcgtgctttttgctgttttttcgaacatatcctaactgtccattgcgcaattacccggtaaaatacgcagaattttcctgggattggtcaaaaggagctcatcctgattatggttagtagtttcacatctgccccacgcagcggtttttactattttgcgcaaggctggaagctcgtcagccaacctgggattcggcgtttcgttattttaccgctgctggtcaatattttgttgatggggggcgcattctggtggctctttacacagctcgatgtctggatcccgactctcatgagttacgttccggactggctacaatggctgagttatctgttgtggcctctggctgtcatctctgtgctgttagtgtttggctatttcttctccacgattgctaactggattgccgctccgtttaacggtttattggctgaacaactggaagcacgattgactggcgctacaccgccagataccgggattttcggtatcatgaaagatgtgccgcgaatcatgaaacgcgaatggcaaaaatttgcctggtatctgccgcgcgcaattgtattactaattctttacttcatccctggtattgggcaaaccgtcgcgccggtactgtggttcctgtttagcgcctggatgttagccatccagtattgcgattaccccttcgataaccacaaagtgccgtttaaagagatgcgcaccgccctgcgcacacgcaaaatcaccaatatgcagtttggtgctttaaccagcctgtttacgatgatcccgctgcttaatctgttcatcatgcccgttgccgtttgtggcgcgacggcgatgtgggtcgattgctatcgcgataaacacgcgatgtggcggtaacaatctaccggttattttgtaaaccgtttgtgtgaaacaggggtggcttatgccgccccttattccatcttgcatgtcattatttcccttctgtatatagatatgctaaatccttacttccgcatattctctgagcgggtatgctacctgttgtatcccaatttcatacagttaaggacaggccatgagtaagatttttgaagataacagcctgactatcggtcacacgccgctggttcgcctgaatcgcatcggtaacggacgcattctggcgaaggtggaatctcgtaaccccagcttcagcgttaagtgccgtatcggtgccaacatgatttgggatgccgaaaagcgcggcgtgctgaaaccaggcgttgaactggttgaaccgaccagcggtaataccgggattgcactggcctatgtagctgccgctcgcggttacaaactcaccctgaccatgccagaaaccatgagtattgaacgccgcaagctgctgaaagcgttaggtgcaaacctggtgctgacggaaggtgctaaaggcatgaaaggcgcaatccaaaaagcagaagaaattgtcgccagcaatccagagaaatacctgctgctgcaacaattcagcaatccggcaaaccctgaaattcacgaaaagaccaccggtccggagatatgggaagataccgacggtcaggttgatgtatttattgctggcgttgggactggcggtacgctgactggcgtcagccgctacattaaaggcaccaaaggcaagaccgatcttatctctgtcgccgttgagccaaccgattctccagttatcgcccaggcgctggcaggtgaagagattaaacctggcccgcataaaattcagggtattggcgctggttttatcccggctaacctcgatctcaagctggtcgataaagtcattggcatcaccaatgaagaagcgatttctaccgcgcgtcgtctgatggaagaagaaggtattcttgcaggtatctcttctggagcagctgttgccgcggcgttgaaactacaagaagatgaaagctttaccaacaagaatattgtggttattctaccaagtagcggtgagcgttatttaagcaccgcattgtttgccgatctcttcactgagaaagaattgcaacagtaatgccagcttgttaaaaatgcgtaaaaaagcacctttttaggtgcttttttgtggcctgcttcaaactttcgcccctcctggcattgattcagcctgtcggaactggtatttaaccagactaattattttgatgcgcgaaattaatcgttacaggaaaagccaaagctgaatcgattttatgatttggttcaattcttcctttagcggcataatgtttaatgacgtacgaaacgtcagcggtcaacacccgccagcaatggactgtattgcgctcttcgtgcgtcgcgtctgttaaaaactggcgctaacaatacaggctaaagtcgaaccgccaggctagactttagttccacaacactaaacctataagttggggaaatacaatgttccagcaagaagttaccattaccgctccgaacggtctgcacacccgccctgctgcccagtttgtaaaagaagctaagggcttcacttctgaaattactgtgacttccaacggcaaaagcgccagcgcgaaaagcctgtttaaactgcagactctgggcctgactcaaggtaccgttgtgactatctccgcagaaggcgaagacgagcagaaagcggttgaacatctggttaaactgatggcggaactcgagtaatttcccgggttcttttaaaaatcagtcacaagtaaggtagggttatgattagtggcattttagcatccccgggtatcgctttcggtaaagctctgcttctgaaagaagacgaaattgtcattgaccggaaaaaaatttctgccgaccaggttgatcaggaagttgaacgttttctgagcggtcgtgccaaggcaagtgcccagctggaaacgatcaaaacgaaagctggtgaaacgttcggtgaagaaaaagaagccatctttgaagggcatattatgctgctcgaagatgaggagctggagcaggaaatcatagccctgattaaagataagcacatgacagctgacgcagctgctcatgaagttatcgaaggtcaggcttctgccctggaagagctggatgatgaatacctgaaagaacgtgcggctgacgtacgtgatatcggtaagcgcctgctgcgcaacatcctgggcctgaagattatcgacctgagcgccattcaggatgaagtcattctggttgccgctgacctgacgccgtccgaaaccgcacagctgaacctgaagaaggtgctgggtttcatcaccgacgcgggtggccgtacttcccacacctctatcatggcgcgttctctggaactacctgctatcgtgggtaccggtagcgtcacctctcaggtgaaaaatgacgactatctgattctggatgccgtaaataatcaggtttacgtcaatccaaccaacgaagttattgataaaatgcgcgctgttcaggagcaagtggcttctgaaaaagcagagcttgctaaactgaaagatctgccagctattacgctggacggtcaccaggtagaagtatgcgctaacattggtacggttcgtgacgttgaaggtgcagagcgtaacggcgctgaaggcgttggtctgtatcgtactgagttcctgttcatggaccgcgacgcactgcccactgaagaagaacagtttgctgcttacaaagcagtggctgaagcgtgtggcagccaagcggttatcgttcgtaccatggacatcggcggcgacaaagagctgccatacatgaacttcccgaaagaagagaacccgttcctcggctggcgcgctatccgtatcgcgatggatcgtagagagatcctgcgcgatcagctccgcgctatcctgcgtgccagcgctttcggtaaattgcgcattatgttcccgatgatcatctctgttgaagaagtgcgtgcactgcgcaaagagatcgaaatctacaaacaggaactgcgcgacgaaggtaaagcgtttgacgagagtattgaaatcggcgtaatggtggaaacaccggctgccgcaacaattgcacgtcatttagccaaagaagttgatttctttagtatcggcaccaatgatttaacgcagtacactctggcagttgaccgtggtaatgatatgattagtcacctttaccagccaatgagtccgtccgtgctgaacttgatcaagcaagttattgatgcttctcatgctgaaggcaaatggactggcatgtgtggtgagcttgctggcgatgaacgtgctacacttctgttgctggggatgggtctggacgaattctctatgagcgccatttctatcccgcgcattaagaagattatccgtaacacgaacttcgaagatgcgaaggtgttagcagagcaggctcttgctcaaccgacaacggacgagttaatgacgctggttaacaagttcattgaagaaaaaacaatctgctaatccacgagatgcggcccaatttactgcttaggagaagatcatgggtttgttcgataaactgaaatctctggtttccgacgacaagaaggataccggaactattgagatcattgctccgctctctggcgagatcgtcaatatcgaagacgtgccggatgtcgtttttgcggaaaaaatcgttggtgatggtattgctatcaaaccaacgggtaacaaaatggtcgcgccagtagacggcaccattggtaaaatctttgaaaccaaccacgcattctctatcgaatctgatagcggcgttgaactgttcgtccacttcggtatcgacaccgttgaactgaaaggcgaaggcttcaagcgtattgctgaagaaggtcagcgcgtgaaagttggcgatactgtcattgaatttgatctgccgctgctggaagagaaagccaagtctaccctgactccggttgttatctccaacatggacgaaatcaaagaactgatcaaactgtccggtagcgtaaccgtgggtgaaaccccggttatccgcatcaagaagtaattcttgccgcagtgaaaaatggcgcccatcggcgccatttttttatgcttccgccagcggcggcaaaatcaattcatcgctctcatgctgctgggtgtagcgcatcacttccagtacgcgcaaccccgctcggtgcactgcatcggttaacgccttccctttcagcaagccactgatgagctgagcacaaaacaggtcgccagtccctttcaggtcggtttttacccgactatgggaaatgacattcacgctgtcggcagtgaccaccacaacctgcatctcctgattttcttcattaccggaggcgctggtaaccaccacccattttaatgtgtcactaagcagactttttgcggcagcaatggcactgtcgagatcgcggcaatttttaccggtcaggatttccaactcaaagatattgggggtaattccctgcgccagcggcagtaaatattgtcgatacgcttcgggaaggtcaggtttgacataaattccgctatcaatatcgtcaatcaccggatcgaccatgatcaataggtcaggatggtctttgcgtagcgcagtcagccactcggcaaggattttgatttggcttgccgttcccatatagcccgtggttacagcacgaagttggcgcagcgcatcacgctcctgaagcgcacgcaaatagccgctaaaccattcgtccggaatcgcaccaccgtagaaagtgtcataatgcggcgtattgctcagcaataccgtcggcacggcaaagacattcaggccgttctgtttgatagcaggcacggcaatgctgttgcccacgctgccgtaaaccacctggctctgcacggcgacgatatccgcctgcagtgccctactcttatcgttaaacaacaacaaactactcatttaattttttctccttgccgatgatcctcatcgtaatccaaccgaaactttacctgattctggcagtcaaatcggctatcacaaaacaaggataaggtaattcaatgaagaaaatcatttgtctggtcattacactactaatgacactccccgtttacgcgaagttaactgcccatgaagaagcccgcatcaacgccatgctggagggattagcacagaaaaaggatttgatatttgtgcgcaacggtgatgaacatacctgctatgaagcggtttctcatctgcgtctgaagctcggcaatacccgtaaccgcattgacactgccgagcagtttattgataaggttgctagcagcagtagcattactgggaagccgtatattgtgaagatccccggtaagagcgatgagaacgcacagccttttttacatgcgttaattgcgcagacggataaaacggtgcctgcggaaggaaattaatccgctttgggaaggcatttacaggaggtaacatgaaaaaacgctttatttatcacgatgaaaaaagcaataaattttggtggatagattacgaaggggatagtttagctgtcaactatggcaaggtaggtagtattggtaaattccagacaaaagagttcgataatgaagaacagtgtctgaaagaagccagtaaattgattgccgcaaaaatgaagaaaggctatcaagaagatccaaagtttaacttcatggatcgctactattttgatgatgaagaaattgggttacatgttaaaacgagtcacccaaacttccagtgccattttactgatccactttatatgtgttgctgggatgaagaatctccttttggcagcgatgaaggtgctgatgctctaaacgttcttgaaaatagcctccgtaaagagccggatctggactgtgctgatttccctcaaatgttaattgaaactatgtggggtatgaaatacatcgctatggacagtattcttgaagaggatgttcgtgcgcaattactagtcgatgaaatgagcactatccagagcaatatgattacctacgcaactgcattcggtcagattaaagtcatgggtaaaatctcccataaacttaaaaagatgggactcaatgcactagcgcgtcatcagcttaccgcaaaaattcttcaatggggtgacggtcaggacagtccaatacttcaaaaaatgattgatgaccttacggcgtttcctcacgaaaattaaatactgcatttgtcggcagcaacaactgttaaaaaagtgcgctttgtttatgccggatgcggcgtaaacgccttatccggcctacaaaatcgtgctaattcaatatattgcagaaaccttgtaggcctgataagcgtagcgcatcaggcagttttgcgtttgtcatcagtctccgatgctattaatccttaaatccccgccccctggctaaaatgctcttccccaaacaccccggtagaaaggtagcgatcgccacgatcgcagatgatcgccaccaccaccgcgtcagggttagcttttgccacccgcagtgctccggcaaccgcgccgccggagctgacgccacagaatattccttcccgcaccgccagttcgcgcatggtgttttccgcatcgcgctgatgaatatccagcacctcatccaccagagaagcgttgaaaatccccggcagatattccgtaggccagcggcgaatgccgggaatgctgctgccctcttccggttgcaggccgacaatggtcaccggtttggattgttcgcgcataaagcgactgacgccggtgatagtgccggtcgtccccatgctggagacaaaatgagtgatgcgcccgccggtttgctgccagatttccggcccagtggtggtgtaatgcgcataagggttatcgggattattgaactgatcgagcagctttccttcgccacgattcgccatctccagcgccagatcgcgcgcaccttccatgccctgctctttggtgacaagaatcagttccgcaccataagcacgcatcgccgcacggcgttcctggctcatgttgtcgggcatcagcaatttcatgcgatagcctttcagcgcggcaatcattgccagcgcaatgccggtgttaccactggtggcttcgattaagacatcacccggtttaatttccccgcgcttttccgcctcgacgatcatgctaagtgccgcacgatctttcacgctacctgccgggttattgccttccagttttaaccacacttcactgccgttatccggccccattcgctgcaacttcaccagaggcgtattgcctattgtttgttctaatgtactcacgatctctatccatacgtggtgttgcctgatgcgacgcttgcgcgtcttatcaggtctacaggttacaaaccttgccattaaaaagcccggatcgcgggaagcgcctccgggcgtttaacattcactcaacctatcaggcgctttgtgcgagagcaagttcctcatcgcgggtttcgatacgctcgtcgccgttatacagccgcgcatgttgcagaccaacgaataaacgctcgccacgctgcggggcatcgtcgccatgcatcacgaccgtcagcggttcgttgtaccaccccagcggctgcaccactaattgggtgtagtgacctttcgggctggcttccagtacctgtaccggcagcgggctatcgaggctggtacggcggctgatatccacttcccaagggcgcaggaagagatccaccggcccctgatacgcaggtgtgtagcccagcggccagcgatgcgcgccaacatggaactgcccgccgcgaatggttccctgcaggcggttcacttcgcccataaattcgagcacaaaacggatcgccggttcgcgccatacctgatccggcgcgtcagcctgttcaatattgccctggctcatcacaactacacgatcagctacttcggtcgcttcttcctgatcgtgggtcacaaaaacgctggtgaattttagttcttcatggagttgacgcagccagcgacgcagctctttacgcacctgcgcatccagcgcgccaaacggttcatcaagcagcagaatttgcggttccacagccagcgcgcgcgccagcgccacgcgctgtttctggccgccggaaagctgcgccggataacgatccgccagatgggcaagctggaccatttccagcaattttgtcactttcgctttgatggctgcggcattcgggcgctcgcgacgcggcagcaccgtcaggccaaaagcgatattgtcgaacaccgtcatatggcggaacagcgcgtaatgctggaacacgaaaccgactttacgatcacgtgcgtgcaggcggctcacgtcggtgccgtggaagcgaatatgcccgctggtttgatgctccagcccggcgataatgcgcagcagcgtggttttcccggaaccggacggccccagcaacgcgaccatctgaccactaggaatatccagactgatatcgttcagcacctgggtgcgaccaaagctcttcttaatattggcaatctcaatgctcatgatgttcctcctgctgtgcgcgtttttcctgattctccaggcgccactgcaacatactttttaaaaacagggtgataatcgccatcagcgttaacagcgccgcagcggtaaaggagccgacggtgttgtagtcctgctccagcaattcaatctgtaacggcaggctcagggtttcgccgcgaatgctgccggaaaccacgctcaccgcgccaaactcgccaattgcgcgggcgttggtcaacaccacgccataaagcagcgcccagcggatgttcggtaatgtgacgcgacggaacatctgccagccggacgcgccaagcaaaatcgccgcttcgtcttcctggctgccctggcttaacatcaccggcaccagttcgcgcaccacaaacggacacgtcacgaagatggtgaccagcaccattcccggccaggagaacataatttgcaggttatgctcgtcgagccaaccgccgagcgggccgttagagccgtagaacagcaaatacaccagaccggcaaccaccgggcttacggcaaacggaatgtccagtagcgtcagcagtaactggcgtccagggaagttaaagcgcgtcaccagccaggccagcagaatgccgaacaccaggtttaccggtacggcaatcagcgcgatcatcaccgtcagccagatggcgtgcagcatgtccggatcggccagattctgtaaaaccggcatcagccccttgctgaatgcctgcacgaagatgtaaatcatcggcaccagcaggatgaacgcgctaaccagcatcccgatgccaatcagaaaccatttgccccagttaatcgggcgcgcgtcataacgcttcaattgggtaacttccgccattaatgacctaccacacgccgaccaaagcgactttgcagagtgttaatactgaacagcagcagcagagatgccgcgaggatcacgctagcaatcgcgctcgctgccgggtaatcaaactcctgtaagcgcacaaaaatcatcaggctcgtcacttccgtcttccacgcgatatttccggcgataaaaatcaccgcgccaaattcaccaagactacgggtaaagctcagcgccacgcccgccaccagcgccggagaaagctccggcagcaccactttgcagaaactctgccagcgcgttgcaccaagcgtttccgccgcttcttcatattccgggcctaactcttccagcaccggctgcacggtacgcaccacaaacggaatgctggtaaaggccatagccaccgcaatccccagccatgtataggtgactttgatatcaaacttcgccagccattcaccgtaaaaaccgtttacggaaaagaggctggccagcgttaaaccggcgacagccgttggcagcgcaaagggtaaatccatcagcgcatcaagcagcgtgcggcctgggaagcgatagcgggttaggatccacgccatcagcagaccgaaaacgccgttaaaaatgcttgccacaaacgcgctcagcagcgttactttgtaggccgcgaccacctgcgggttggtgatcacctcccagtactgcgcccagctcatctgggccagttgcatcaccagcgcggagagcggcagcagcaaaatcaggcacacaaacagcagactggtgccgaggcttaaggtaaagcccggcagcacgcgtctggaggagacagcaaacatcagttacgccccgccgctaacagcttgtctaactcgccgccgctggtgaagtgggttttcatcacttccggccaggagccaaatttgtcttccacgcggaacagctcggtctgcgggaatttgtctttcagtttgtccatcacctccgggttattcacgcggtagtaatagtcggtgatgatggtttgcgcctgcgggctatagagccagttcagataggctttggcggctttttccgtaccgttggcctgcacgtttttatcaacccacgccaccgggaattccgccagaatgttggttttcggaatcaccacttcaaagccctgcgcttcatactgtttacggatgttgttcacttcgctttcgaagctaatcagcacatcgcccaggccgcgctcggcaaaagtggtggtcgcgccacgaccgccagtatcgaacacttcaacgtttttcaggaactgggtcataaactgttcggttttgcctttgtcaccaccgtcagctttatccgctgcgccccatgccgccagataggtataacgcgcgttaccgctcgttttcgggttcgggaaaatcagcttcacgtcggagcgcaccaggtcgttccaatcgtggatattcttcgggttacccttacgcaccaggaagcccatggtggagtagaacgggctgctattattcggcaggcggctctgccagtcggccgggatcagcttgcctttatcgtgcaggatttgtacgtcggtcacctggttataagtgacaacgtcggcttttaagccctgtaaaatcgccagcgcctgtttactactcccggcatgagattgttttatcgtcagtttgtcgccgccgttatcttttgcccattgttgctcaaacggcggattcagggcggcaaacagctcgcgggagacgtcataagaactgttcagcagttccgttgcctgtacatggcccgccagcagcagagaagcgaccagcgcgagactgttctttttcagtaagttaacggccattgcgcacccttataaatttaatgactttctaatagccatcatatttataacggacgtgaaaggagtaacggttttatataccgtttggtgatttggaagttgaaaagggaataagaacttggttcaacaggcgtaattgttgcagtcagtttggacacgaacagcgcggagaaaccggagcgtacacatagtacgtgaggatttcgagcactgcccggggccaaaatgacaaataaaatagcctggtgaacttagttcaagacgaaatcctccccacaaatgcagggaggaaacagaggtgaatcagataccgacgctaaccgtctccggcagtgtgctgccgccatcaatcacattctgtgtaccggttaaatagctggattcatcgcttgcgaggaaggccgccagttcgccgacttccagcggatcggcgaggcgacgcatcgggattgctttcgccatttcagtcagcacgctctctggatcttccgggttgctctggcgggcaatgctttccgccattggtgtgcgcacgtatcccgggcaaatggcgttaacgcgaataccagactgcgcgtactccaccgccaggctttttgtcaggccaacaatcgccgctttcgttaaggcgtacgccgtttcgccaggatcggccaccatatcaccagtgacactagacatcatcacaatgcgaccatctttgcgggcaatcatctccggcagcaccgccttcgtgacgttccatacgcctttaatattgatgtcaatatggaaatcgcgatcgtcatcgctcatatcgaggaaactgcccagacgacaaacgcctgcgttattcaccaggatatcaatgcgcccttctttttccttcgcgcgtttgatagctgcggctacgctcgccgggtcacgcacatcggcgacaaccgccgtacagcgatgaccacgaccacacagttcgtccgccagcttttcgatctcaggggagatatccagcaagattaggttcgcgccatgacgtgcaaaagttctggcaattccttcgccaattccctgcaatgcgcccgtaatcagtgctgtcttgcccgtgagtttacccattttaatgctctccttgttaatacagagcgttacactccattccctctgaaaatacaggataaacaaaatattgctgcggatcagctcactaattcaggaaaatctcaatccagtcgctgctttatgcatcatttcaggcgttgtgttagctcactgctgcgctgaatcattttcaaactctccacatcattgagttgcacaaggccaacaaacagtaaatcggtaacagaattttgcgccgtgcgggtagacatgctgctgctacgccattcggtttctccggaaacggtatcgagggtgaaatgcgccagccgccgcagcggagagtcagtcagagaagtaatggcaatcaccgttgccccctgctttcgtgccgcttctgcgcacaagacaatctcttttttactgccgctgtaagagatagcgatttgtacatcgccttttttcaacgcctgagaaacggtggcttgtacgtgcgtgtcggcttcgcaggccacgcgatagccaattttcatcagtttgaagctcagatcgcgccccaccagcgcgcttccgcccaggcccgttatctggataaacggtgctttactgatgacctcaatgattttttgcagccgcgcgtaatcgagcaacgcgcaggtttgctccagcgccagctctttttcgcgattcagtttgcgcgcgatcacttccaggctatcatcactggtaatgctactgtgcaggtgcagtgccgtggcattcgttttctcccggctggcactgtattcgcctattaacgccatacgcaattcagtaaatccttgcgcgccgagtttttgggcaaatttcactatgctgctctggctaatgccgagctgtttcgccatctgccgactagaaacggattgcagctcactcacgttggcctgcagaaagtcagcgattttttgctcgttttcggtgaattcactccccgcattgcttattttcgtcaggtacaacatcttccactctcctgggctggcagcataaattccgcttaagttcttatgacgctcttcacactctgcgagtgtagactcaatgattcctttaagcctgtcaattcgggatatatgattccatacatctgcaattatttgatcgtaaatagtaaggtcaccaccgatgcaatttgaaaagatgattactgaaggcagcaacaccgccagcgctgaaattgaccgcgtaagcacgctggaaatgtgccggattatcaacgatgaagataaaaccgtaccgcttgccgttgagcgcgtactgccggatatcgccgcggcgatcgatgttatccacgcccaggtaagcggcggcgggcgtctgatttacctcggtgcgggaacatccggtcgtctggggattctggatgccagcgaatgtccgcccacctacggcgtgaaaccgggtctggtggttggtttgattgctggcggcgaatatgccattcagcacgcggtggaaggcgcggaagatagccgggaaggcggtgttaatgatctgaaaaatattaatttaacggcacaggatgtggtggttggcattgctgccagcggtcgcacgccgtatgtgattgccggactggaatacgcacgccagctcggctgccgcacagtgggaatttcctgtaatccggggagcgccgttagtaccaccgctgagtttgccattacaccgattgtaggtgccgaagttgttaccggttctagccggatgaaagcaggtacagcgcagaaactggtgctcaatatgctttccaccgggctgatgattaaatccggcaaagtgttcggcaacctgatggtcgatgtggtcgccaccaacgaaaaactgcatgtgcgacaggtcaatattgttaaaaacgccaccggatgtagcgcagagcaagcggaagcggcgttaattgcttgcgagcgcaactgtaaaacggccattgtgatggtgctgaaaaatctcgatgccgcagaagctaaaaaacgcctggatcaacacggcggctttattcgtcaggttttagacaaggaataacccatggccaaagagatcagcagtgaacttctgaacaccattcttacccgtgtcggcggaccgggaaatatcgccagttgtggtaactgtatgacgcgcctgcgtctgggtgtacatgacagtagtctggttgatcccaatatcaaaacgctggaaggcgtgaagggcgtcattttgaccagcgaccaggtgcaggtcgtttttgggcctggtaaagcgcatcgtgccgcaaaagcgatgagcgagctgctgggagaagcaccggtacaggatgccgcagaaatcgccgcccagaacaaacgtcagttaaaagccaaacaaacctccggcgtgcaacaatttctcgccaaattcgccaccatcttcacgccgctgatccccggttttattgccgccggtctgctgctggggatagcgacgttaattgccacggtgatgcacgttccggcagatgctcagggaacactacccgatgcgctgaattttatgaaggtgttcagcaaaggtttgttcactttcctggtgattctggtgggctataacgccgcccaggcatttggcggcacgggcgtaaatggcgcaattatcgccgcgctctttttgctcggttataaccccgcagcgaccaccggttactacgccggttttcacgatttctttggtctgcccatcgatccgcgcggcaatattatcggcgtgctgattgccgcgtgggcctgcgcccgcattgaaggcatggtgcgccgctttatgccggacgatctcgacatgctgctgaccagcttaatcaccctgctgatcaccgctacgcttgcgtacctgatcattatgccgctgggtggctggttattcgaaggtatgagttggctgtttatgcacctgaacagtaatccgttcggttgtgcggttttagccgggctgttcctgatcgccgtggtatttggcgtgcatcagggctttattcctgtttacctcgcgttaatggacagccagggattcaacagcttatttcccatccttagtatggcaggcgcgggccaggtgggcgcggcgctggcactctactggcgggcgcaaccgcacagtgcgctacgcagtcaggtacgcggggcgattattcccggcctgctgggcgttggtgaaccgctgatttacggtgtcaccctgccccgcatgaagccgtttgttaccgcctgtttaggcggcgcggcgggcggtttgtttatcggcctgatagcctggtggggtctgccgatgggcttaaacagcgcctttgggccgtctggtctggtagcgctgccgctgatgacttccgcacaaggcatccttccggccatggcggtttatgctggcgggattctggtggcatgggtttgcgggtttattttcaccacgctctttggctgccgtaacgtcaatctggactgatatcatgaaacggacaatgctctatctttctctgctggctgttagttgtagcgtcagcgccgcaaaataccctgttctgacagaaagcagcccagagaaagcagggtttaacgtcgaacggcttaaccagatggatcgctggattagccagcaagttgatgtcggttatcccagcgtaaacctgctgatcattaaagataatcagattgtgtatcgcaaagcctggggagcggcgaaaaagtacgatggcagcgtgttgatggaacagcctgtcaaagccaccaccgggacgctgtatgacctggccagtaacaccaaaatgtacgccacgaacttcgccctgcaaaagctgatgagcgaaggcaaactgcatcctgacgatcggattgcgaaatatattccggggtttgccgatagtccaaatgacaccattaaaggcaaaaacaccctgcggatttctgacctgctgcatcacagcggcggtttcccggcagatccgcaatacccgaataaagcggtcgcgggcgcgttatattcccaggataaaggccagacgctggagatgatcaagcgcacgccgctggaatatcagcccggcagcaaacatatctacagcgatgtcgattatatgctgcttggatttatcgtcgagagcgttaccggtcagccgcttgaccgctatgttgaagagagcatttatcgcccgctcggcctgacacatacggtatttaacccgctgctgaaaggctttaaaccgcaacaaattgccgccacggaattgaacggcaatacccgcgatggcgtgatccatttcccgaatatccgcacctccactctctggggtcaggtgcacgatgaaaaagccttttatagcatgggcggcgtttccgggcacgcaggtttgttttccaataccggcgatattgcggtgttaatgcaaacgatgctgaacggcgggggctatggtgatgtgcagctgttcaatgcggaaacggtgaagatgttcaccaccagctctaaggaagatgccacttttggcctcggctggcgcgtgaatggtaatgccaccatgacgccgacgtttggcacgctggcaagcccgcaaacctacggtcacactggctggaccggaacggtgaccgttatcgatccggtgaatcatatgacgattgtgatgttaagcaacaagccacatagcccggttgccgatccgcaaaagaatcccaatatgttcgaaagcggtcagttgccgattgcaacttatggttgggtagttgatcaggtgtatgcggcgttaaagcagaagtaataaaaaggccagtcagtaatgttactggctggtctgagagtgctgacaaacgcaaaactgcctgatgcgctacgcttatcaggcctacgtggagcccacaatatattgaattagcacgatttcgtaggccggataaggcgttcacgccgcatccggcgtgtacaacgcgcacttggtcaacaatctgaggccagtcagtaatgttactgcctggcctttaatcaatgaatcagaaacgcttacagcgccatcaacttgtccaggctcggtgcgaaataatagccgccggttaccggtttggtgaaacgcaacatcgcatcacgcttaccatcggtatcgccaaacatgctcagcagttgctgctcaatgttatgcagacgcgcgcagtaggcgcagaagtacagaccgtgagtgccactggcagtgccgtacggcaggctctggcgaacaatcttcagccctttgccatcttctttcagatcaacgcgggtgaggtgagaggtttccggacgttcgtcgccgtcgatctcttcgttggcctctttggtgcgcccgatcaccatctcctgatcgtgaacgctcatccggttgagctgcttcaggttgtgttcccaacgctggacaaacacatagctgccgcccgcatccacgccgtctttgataaccgccacttcgcgacgcgtctcttcacccgccgggttttccgtaccgtcaacaaagccgctcaggtcacgctcttcaacccaacggaagccgtggatctcttctttcacttcaatgcagtcaccaaaggcttccatcgccgcctgggcgacagagaagtttacgtcgtgacgcagagaaagaatgtggatcaacacatcgaactgggtcgtcggcgcaaggcctttaccgtagcccggaaaatctttcagctcttctgccccaacgccgccgctcagagcgcgccaggtgttgttaccaaaggcaaccaccgcaccaagatgcgcgtccgggaatttcgcttcaaaagttgccagtttgtcggcaaatgttttactggccgcacgcagggcgtcaacttcccctttcacgttggcttcgatccaaatcgccgcgcggcaatgttctggcaaaatgccactctgaacctgagacattgttcctcctgaaaataataatgccacgcaatccgtggcattgttgagcgctattttacgtgttttttcgcggcggcggtttgttcagacgcaaattaacgccgccagataattttactgactttccagtttttcagggtatcgtcgctaggcattaacccttcaggaccacgccattccccgctgaactggtagctaatatgttgactgccttcggctttacattcgacggcacgattatcatcaccatcagctttttggcaattgccaaatgctttgctgtaaaggtcgctaaacggtgtaccgattttaacaccggtgtcagcaggaatatcgctatccagcacgtcaatgcgactgatcgtgccttgatcgccgttaatcaccatcgccacgttgtcgcccttcatcacttcaaaaaagcgcaccacgttgccgttcgcggttttcattccgctgcgcaggcgataatcgccatcaagcgcatcggcaatggcttgttcttgcagtggtgtggacgccgttaattcacccacgccctgctcgctcactttggtggagctcccaaaccagttccacgggttagcggcagaccagttaacactgctcatcgtggaacagccggtcagcatcaatggcatagcgcataacattaaacgcaggcttttcatgtcacttcctttggttattcaataacgttgcttggagtgcaaattcaccaaaaagtgccgttattcttttacttcataaaaacaagcgcgtaaacgtcgattggtcagcagccagattaacgccacaatatccgccactaccagcgccagaccgataccgctaacggattcaccgttcagccacagccacggttgccagcaaagtaaaaccacctgcgccaacagcaacagaaaatagagtacacgccaggtgcgaggaaacgtagcccgccgaccgctcaacaaaaacgccagcaccgccggaatgccaggaatcagccccagccagaaattatcgtgatcgggataaaacagatttagcagcgcagtaccctgctcgcggctcgcaccggcaatgacaaacagcacccaggttcgcgcctgaagcaatagcacaagccagaagagcaagggtaaacgcaggcgaccgtgcgcatcataatggacaggatgaaactcagtactcttcatcttcaatcaaacgcttacccagactcagcacgtcggcgtgttcatatcccaggcgttcatacattccgagcaccatgtcgttatcttccggcacattgatctgaattttcgggcagccacgagcaatcagctttttctccagccgattaagcaacgcattggcaatcccacgcccacgaaactctggatgcacgccaagataataagcagacccgcgatgcccgtcataaccgcccatcaccgttccgaccacgtcaccgtttacctcagcgaccaaaaacaaactgacgtcatggttcatcttacgctcgatgtccatttccggatcgttccacggacgcagcaagtcgcaacgctcccaaagggtgatgacctcttcgaaatcttcctggcgaaatacgcgtatctccatggtattcgttacctttttgcgggttaaaaggctgattatggcgtgaacggtcgaattagccaatatctgacgaaaatcggttgaaaaagtggcataatggggagttgtcaactattgaaatgaaaagtaaaacaattctcaacagcaaaccgtcgtaacggattacgcgatacgatataacatctggaactttattattacaactcaggccgtatgagcacttttaaaccactaaaaacactcactagccgccgccaggtgctgaaagccggtttggctgccctgacgttgagtggaatgagccaagccatcgccaaagacgaacttttaaaaaccagcaacggacacagcaagccgaaagccaaaaaatctggcggcaaacgtgtcgttgttctcgatccaggtcacggcggaattgataccggagcgatcggacgcaacggtagcaaagaaaaacatgtggtgctggcgattgctaaaaacgtccgttccattttgcgtaatcatgggattgatgcgcgtttaacgcgttctggcgatacgtttatcccactttacgatcgcgttgaaatcgcccataaacatggcgcagatctgtttatgagtattcatgccgatggctttaccaacccgaaagctgccggtgctagcgtatttgccctctctaaccgtggggcaagtagcgcaatggcgaaatacctgtctgaacgcgaaaaccgcgccgatgaagttgccggtaaaaaggcgactgacaaggatcacctattgcaacaagtgctgtttgatctggtgcaaacagataccattaaaaatagtctgacgctcggcagccatattctgaagaagattaagccggtgcataaactgcacagccgcaacaccgaacaagcggcatttgtggtgttgaaaagtccgagcgttcctagcgtgctggtggaaaccagctttatcaccaacccggaagaagaacggctgttaggcacggcggcgtttcgtcagaaaatcgccacagcgattgctgaaggcgtgatcagttatttccactggttcgacaaccagaaagcacatagcaaaaagcgataagttatgaaacccgacgcacaccaggttaaacagtttctgctcaaccttcaggatacgatttgtcagcagctgaccgccgtcgatggcgcagaatttgtcgaagatagttggcagcgcgaagctggcggcggcgggcgtagtcgggtgttgcgtaatggtggtgttttcgaacaggcaggcgtcaactttagccatgtccacggtgaggcgatgcctgcttccgccaccgctcatcgcccggaacttgccgggcgcagtttcgaggcgatgggcgttagtctggtagtgcatccgcataacccgtatgttcccaccagccacgcgaatgtgcggttttttattgccgaaaaaccgggtgccgatcccgtctggtggtttggcggtggcttcgacttaaccccattctatggttttgaagaagatgctattcactggcatcgcaccgcccgtgacctgtgcctgccatttggcgaagacgtttatccccgttacaaaaagtggtgcgacgaatacttctacctcaaacatcgcaacgaacagcgcggtattggcgggctgttctttgatgacctgaacacgccagatttcgaccgctgttttgcctttatgcaggcggtaggcaaaggctacaccgacgcttatttaccaattgtcgagcgacggaaagcgatggcctacggcgagcgcgagcgcaatttccagttatatcgtcgcggtcgttatgtcgagttcaatctggtctgggatcgcggcacgctgtttggcctgcaaactggcgggcgcaccgagtctatcctgatgagtatgccgccactggtacgctgggaatatgattatcagccaaaagatggcagcccagaagcggcgttaagtgagtttattaaggtcagggattgggtgtaactccctcacccccactcccgcatccgctgatgcagcgtcagactcggcttctcggaaaacagctgctggtaatccgtggcaaattgccccagatgccagaatccccactgcatggcggcgtcttttaccgtcatactttggctccacggacttatcagttcgcggcgtacggcgttcaggcgaatgcgtttcagccacgcgttcgggccaatgcctaaaatagcgtgaaacgcgttttgtagcgtgcggcggctgacatgcagttgattacacaaatccagcaccgtcaccggttcggacatgttttccagcacatattcacgggcgcgggaaagcaatcgacggtaactctgatgactgatgctttccgccgtcaccattggttgcgcttcttccagcatggcccccatcgccattagcaaattatcccccagcacttttcgcactgcaggctgatggagattttccggattctcgcaaaacgtcgccagcgcctgttggacaaagccccacagcgcggctttatgctgctctttcacttccagcgcgctctggttacgcaacatatgtaatacccgatccgggttatgcaaaaagttagcctgccgggtgatgacatcttcagaaagcaccacgcccaggatcgtgtaatcatccggcgtgctcagttcaaattcagtgccaccagggcgggtggcgatttccgcgcttcccagacattggctaccgataaatccctgctcaccgcgcgtcgccggaatgccaaaccagaagctgttcggccagaccaggcagctctgacgcagcgccagaccggtgtattcacgaaaaacctgaatatcatcgagtagaatttccgtaaattcaccatgaaacttgcccggatgcagctgatcgtaaatctgctgccaggcggtaatcgttaaagcatgttcatagacatccgttgtctgtcgttgatgaacattatccacttcgaccttcggcgtgagcttcaggttttcgggtaagggttcatgataaagatggtgcaaattggctgtacgggtctttttcatgatgttaatgccgggtgttgtaggacacccggcacctccgacaggttaatggggcttgagacgataacgactactgcgtttacgtaacgtcccggcagaaaagagctgttcgagcgcatttctggctttttccagcggccagccaaagtgggcagccacttctcctgccgtcattccctgacgtacacttgttaacagcgccaacaactcgtcagcagattccgcgacgataactggcgcgtcgggttcccttacgggttgcttcggctggcggttaaagccagtaaccagccactgggtgtcatcgtctggccgaccgatctccttgcggctgatgacacgcccggtacgcatcgcggcagcacaacctgcgtccagcgccgcacgacacgccgccagatcgccttccaccaccagcgttaagcgaccagggtcaagcacttcgtgactgagcagacgaacgttagctgctttgagcatggcatccgctgcatctatcgcggcgaccatgccgtccacttccagcaatcccagtgcattgatcatcggcaacctccgttacgcacgctggattggattacgcgcgatttccagcactgcatcggtaaaggcgttacaggctgctttacacgctgcctggctaccggttaaaaatgctgcgctgtagttggtttcagacggtggcgggacataggtcgccagctgtacgtcggcagacttcagggctgcatcaatgccataggtcgcttccagcggcggtgccaccagatacgccatcggatcgccaagcgtgatcccggcggtactactgagataagaaccggtacggctaactacatgtgccaggaatgccgtatcttgcgcgtcattagcccactggaaagctgcgccattttcaatatgcgcaatcatcgcatccagacctgcacgcacttccgccgggtttggcccaccaagcataatcagcacttcaccggcagtcggactcgggccgtgtgcagcgcccgcatataggctgcggccatacaccacttccaccatcgcctgcttggtcgcttcatcagcggcaatgtaggtgacgtcatcggagtcggcagaaatcagaccgaggctacgaatatgcggcggcaatttcagttcacgcgcaaaatcggcgttaacggaggcaatcacccgcatagcggtgacagacggtcgaatcaaatctaaagctggcatgatgcctccttatcgggtcatgttgatgccggatgctttctgctccagcatacgtttcgccaaatccacaatgacggctgcggcttcaaccggcggcgtgccgccctggtgaatgttagagatacaggtgcgatcggcctcaacggtggtcgccatacgcgggctgtaaacggcgtagcaggagaggctttcactctgacccaaccccggacgttcgcccaccagcaggatcactactttcgcgccgaggatctcaccgatctgatcttcaatcttcacgcgaccataacgaacaaagaatggtgtaccgactttcagcccggcctgtttcaggcccgccatcagcggtggcaggatctcttcgtagttcacggtgatcgcatcagtactcaggccatcagaaataacgacctgtacgtccggattggcaacacactgcgctttcagcgcttcaacagcttctgcacacaggcggcggcccatatccgggcgagtcaggtagagatttttgtcgctaatttcagagcgtacttccagcaagccctgcgctttcacccactcttccggcacttctttcagtacggtatctttgctacgagagtgatcggccaggaaacgcagcagcgcctgcgtacgtggacgcggaccggcacgaccggtacaaacgcgggccacggtgctgcggcgcagttctgttaatacgtctgcgcgatgcggattttcaacaccaatccacgcttttgcttcagcggaacctaaatccagcgcacagctttcgctggtcaccggtgccgcacagttggtggtggcgcactttgcttcactcggcgcgggggccgcttgtcccatactcgccatcacgctgcgtacaatttcttcaatctgtttttgatccatgatatgttatctccgcgtcatcagaagaacagactcggatcgcccgcccgtttggtcaggcgaccgtttgccataatgcccatgctttccagccagcgttcaaactccggactcgggcgcaggttgagtaactgacgcacagtggcggtatcgtggaatgcggtggtctggtagttgagcatgatgtcatcacccagcggcatccccatgatgtagttgcagcctgcggtggcgagcaggatcatcaggttttcgttgaggttctggtcagcgtcagcgtggttggtataacagcagtcacagcccatagagatgccgctcagcttgcccataaagtgatcttctaagccagcacggataatctggcggtcgttgtagagatactccggcccaataaagccgaccacggtgttgacgataaacggatcgtaatgacgcgccagcccgtagttacgtgcttccatcgttacctggtctgcgccgaagttagcgccagcggatagcgcagagccttgtccggtttcgaagtagaggcagttttccccggcgatacggttgaactccgcgcccactgcgcgcgcttcgtcgagcatcgccagctccacgccaaactctttcagccctttttcgctgccacagatactctggaaaatcagcccgcccggtgcgccacgacggatcgcttcgatctgggtggtgacgtgcgccagtacacagccctgagttgggatgttgaatttgtcgatcacgccatagatggtatccaacacgcggcttaagttttccacgtcgtcagtcaccgggttaacgccgatcaccgcatcgcccaccccgaaggaaagcccttcgtagatttgcgcggcgatactttgcacgtcgtcacgggtgtcatttggctgcaaacgggcgctaaaggtgcccggaataccgatggtggtattggcctttttgattaccggcattttcttcgcgccgtagatcaggtccgcgttggagcaaatcttcgctaccgccgcgaccacttcgctggtcagccctttgcgggtaaaggcaatgtcgtccacgctggtttcatcgctcagcacatactcacgcagttcgctgatgctccagtttttaatctggttgtaggccgtttcgttaacatcgtcctgaatcagccgcgtcacgcagtcatcttcataggcaatcaccggattattgcggatgtccgctacggtcatttcgctcaacacctgctttgccgccacgcgctcctgactgcttgccgctgcgacgcccgccagcacatccccgctacgcagttcgttggctttagccagcacctcttttacatccttaaactgatatacattgccgaacaatgtggtctttagtttcataagtcgttccctcaggaaggaaatgcgagacttttcaccgtcaccggcacaacgcttccgccaaaaagaggcgtaccaatgtcgatatagtcccccgcgcggacaatcacttcgtcaatgactgccaacgggagttgttgtagctgtgggcgcaacaacatgcccagagctttaccaaagtcctgcccggccaccaccagcaggggatgcggattcggaaaacgcgcgacgaaatcgaccaacgcgttgatgaccgtcagtaccgcggcgtaacgcacaggcaggctggcgggaagcgccagcacgtacgcgtcagttttgggatcaagatccagctgaatcagcgcctgttgccaggcccccaccagatccgtttcatcaatcgggatcgccaccggcaaattgcgcagcggcagttgtacgccctcaagccagattgtgctgccagagaggctaagggtatgcgcgcccgcgccaatcaccgtggcgcgcacggtttgcgccggaaactgtacgttcatctcacgcaggcgcggatggtcatgcagcgcagttgccagcagcgggccaatatcggcaaaacagaacgggtcggcgggctggtggcgataacattcgcccacgccgccagaaagcgtaatgatttcgggcgtaacacctgcgggcagcaaaccggtttgcatcaatgcctgcgcgagcggactgagcgttccgtcaatcacttcgacaatcagttctgccatccgccgggtcacctgcaccagctgcgcgccggtcaggctacgggcgtcggtgcctgcaccgaagcactcatccacaatcatctgccccggtttatgagcgtaaaccacgcgcccgtggctgtcggtttccagcaggcgaccaccgacgttgaggcaggcagtgccgctgatttttccggcatcgaacagggcgtagttcgcggtgccaccgccgatgtcgatattcagtacccgacacagccgttgttcagaaagggtttgtgccccggctccgtgaccggcgatcacggattcgaggtgcggcccggcgctggcaacgacaaaatcgcccaggctctgagagagcgccatcaccgccgggcgagcattgcgggttttcgcgctttcaccggtgatgatgatggcaccagaatcaacgctttccggctcaatacccgcagcatgatattgctcgagtattaaggttttcagttccgcttcttttaaaccgccctgtttatcgacaggggtaaagaacaccggactttgccagctaatttcgcgtttaatgaattcgtagcgcggcacctggctcaccgccgcacggttaaccagctccagccgggagaaaatcacctgggtggtggtggtgccgatatcgataccgacgctcaatagctggcgagtgttcacgattgtgcctccgcttcggtttaagtcagctttgtgcctccgcttcggttttagtcgcggtcgcgtcttcttttggcaccagcatcatcgccacgccaatcgccgttacgccgccgatcaacttgccgacaatcatcgggaagatcatggcgttcatgttggcagcggcgaagcctaagtggtcgcccagggcgaaagcagcggaaacggcgaaggcgcagttgatgactttgccgcgggtatccatctgcttcatcatgccgaacatcgggatgttgttggcaagcgttgccaccatgccggctgccgcgatgttgttcatattcagtactttaccgacgctcatcagcggtttttcaaaccagcgagtcagcagcagcaccatcggatacgcccctaacagaacgcaggagatagaaccgataacttcaatggcgcgcatcacctcaccgggtttatcgccaggggccataaagataggatccagaccggggatcagttcccagccaagcaggaatttcactaccgcagcggcaagaccgagggtgatcaatgcaacgaggaatttggcgaagatctggaagccgttgatcattttttccgggatgaatttcagccccagcgccaccagaatcgcaacaatgatcaccgggatcatgttcatcaggatcagggcgaaagtgaattccaccggctggccgttgatctgcacaccggagtacatagcaaccagaccaccagcgatacaaccaatcggaatggtcacaatgcccgccagcacgccgagcgccagataacgacggtcagaaggttcgataatgccgagcgccaccggaatggaaaacacaatcgttggccccatcatgctcccgagaattaacccagagtatagccacgcggctacgtcgccgcccgccagctctttggcgaggaagaagccgcccatatcgcacgccagcagtgttccggcgaacatgcttgggttagcgccgagcatttcgtaaaccggaataattaccggcccgagaacgtgagccagtaccggtgccagcgcggtcataccgaccatcgccaggcccagtgcgcccattgccataaagccttcttcgaactgaccgccacttccttcgatacttttaccgaacttaccgaggaaacgagcagaaccgccgaactggctcaggatcctgtctacggcagctatcagcataaagaacatcatgatgtacatgatgatttcgttaattcccatcgcctttactccctgttagttgttatttattggcggatgcggcgtaaacgccttatccgccctacatgtgcaatcccgtaggctggataagacgcggcaagcgtcgcatccggcaattgcaccgcgccactggcggatgcggcgtgaacgccttatccgccctacatgtgcaatcccgtaggctggataagatgcggcaagcgtcgcatccggcatttattgcgccgctgcgtacaggccgacaatctgctccaggctggcggtacgcgggttactgcgcagacaaatatcttccagcgcggcctgcgcccatgcgccgtaatgcgcagatgtcgcaccaacatcgcccagtcgtttaccaatcccaacttccgcaatcagctcacttaccgcgttaatagcgtcacgatcgtcggattttttagttcgcagtgcccgaccaatctgactaaagcgttcacgacaaaccatccggttaaattccatcaccgttggcagcaacatggcgttcgcgagaccgtgcggaatatgcagcgccgcgcccggctgatgcgccatcgcgtggcacaacccaagacccgcactggaaaacgccattcccgccatacaactagccagcaacatgctctcgcgcgcggcaaggtcgtgaccgtagcccaccgctttcggcaggcttttgccaatcatcgcaatggcaccaatcgccagactgtcggtaaacggtgtagcgttcagggcgctgtatgcttcaatggcatgggttaacgcatcaatgccggtcatcgccgtgacatggctcggcacaccttcggtcaatgcggcgtcgaggatcgccacatccggcatcaggctggcatgggctaacacctgcttgcgcccgctcaccgcgtcgataatcaccgttacattggtggtttcagagccggttccggcggtagttggaatggcaatcagcggcaagcgcggttgcagaacgctggtttcactcatctctgccagcgtgctatccgggttcgtcaccagcaacgtcacggctttcgccgcatccagcacgctgccgccgccaaacgcgatcaccccatcacagccactctcacgcaactgcgccacggctgcacacacgtcggtaatgcacggttcgcccaccggacatggccagagcgtcatggcgatacctttaacggtcaggctacgcgtcagcccggcggtcatccctgcctgatgcaaaaagctgtctgccatcacgaacagatgtttcagcccacgcgtttgcgcttgctgtccgcaactgctcacgctgcccggaccgcaaagcgtcaccggtggaacgctaaatgtttttacccgttgcagattcagggtatcgaacgcctgaaagagcgcggtctgcaattcattttgcatatagcccctccgctttctctcgcccactactggcgatcgccagcggggtcataaacaaactgtgctgcggtaaatgcacctgtaacgccgggaattgtttgcgaaacagttccgccacgcccggttgcatacaagagccgcccgccagccataaatcagtaatgccctgcccttcaatatgccgggcgacaatgtccgccattttttcgtacaccggtttcaccgcaggccaaatctcttcaccgtgaccgcgcttgtactgctccgcctcttccaggctaatacggcgatttccggcgagagtcagagagatgtgatgtccgccggtggcttcatccgcgctgtacgtcaccttgccctttttcacgatggcaatgccggtagtgccgccgccgatatccactacaccggcgttgtccagttgcagcagatccgcaactgcggttggctcatccagcacatggctcacttccagtccggcagattccagcacgttgatggaaatacgcgggtccgtacctggaggaaaactagtcgccgcatggctaaaacgacgaccgaattgctgctcgagcgtgtcgagatggcgacgaacaatggtgacagcgccgaagaaatcccagacgatgccgtcgcgaaccacatcggcccagtcgaggcataccgccactggctgaccgtcgcggtcgacaaccatgctcaccacatcgcaggtgcccagatccacccccagccacagcggagattccgtcgcggcgggcgtctggttacacagcgttgccgccgtttgcagacgtggggtgagccattgttcgtcgtgcgccatctgttactccttaaacaatgcgaaacgcatcgactaatacacagcgacgcagacggacaaacgtacgcgcgctggttaccccttcaccggttggcgtggtgatggtcatggtggtccagccttccccgcccagccccagcccggcaatgcacggtccgttcttaacgaaaatgctggtatcaatagcattcgccatctggttcatgttttcgatgttgcggctgtgcattgccgccgtgtggtggcaaccgccttccagtttcaccgctagcgcaatggcatccgccacgttggcgacgcgcacgacgggcaacaccggcatcatcagttcagtcacggcaaacggatgttctgcggtggtttccacaaacagcaggcgcgtttcttgcggaactttaaggccgattgccgccgcgattttgcctgcgtcgcgaccaacccagtcacggctgacggtgccttttccgcgctcgtcgatatttttcagcaacaccggttgcagctgctgcgcctgttctgcggtcagtttcaccgcgtgctggccttccatcagacgcatcagttcatcggctacgctatcaacaacaatcagtaccttttcgtcggcacaaatgatgttgttatcgaaagaagcgcctttgacgatggactgagcggcacgggcgaggtcggcggtttcatccaccactaccggcgggttgccagcgcctgcggcaatcagacgtttattggtgtgtttacgcgccgcttctactaccgcttcgccgccggttaccaccagcaggccgatacccggaaacttgaacaagcgttgcgcggtttcgatatccggatttgccacagtaaccagtaagttttccggcccacctgcggcaacaatcgcctggttgagcagcgtaatcgcccgctgggagacttttttcgccgccggatgcggggcaaaaatgacgctgttgcccgcggcaatcaggctgatggcgttgttaattacggttgccgccgggttagtggaaggcgtcacgctagccaccacgccccagggtgcgttttcaattagggtcaggccgttgtcgccagtcagcacttgcggagagaggcactcaacgcctggtgtgccgcgcgcctgagcgacgttttttgcaaatttatcttcaacgcgccccatgccggtttcactgacggcaagttccgctaaatctctggcgtgtttttcgcctgcttcacgaatggcagcaatggctaactggcgcattgccacgctttttaacccttgctgggcgactttggctgccgcaacggcgtcatccagggacgcgaaaacgcccatctcatgaacggcggcggacggcgtgtcactgctttgcattttcagcagtaccgctttcaccacctgttcaatatcctgttgattcatgatgttctgccttatttgtggaaaattacctgaccgccagacaccacctcatcgacaatgccaatcacgcacagatcgaccggactcgtttcgcttttatgcgcctggcgggcggaactgccactcaccagtaacacccactccccggttcccgcgccaatattgtcgatggcgacggcgcattgcccgtcaggattaccttgtggatcaatcatttccaccatcagcaatttgtcatgcgccagtccgtgatggcgtacggtacaaacaatttgtccagtgacgactgccagtttcatacccgcctccgtggcgtatttcaggtaaaagctccccctaccctccgcagaaggtaaaatgaaaaaggagagagcgtgacgcccgaatcgacgtcacacagggtgattacaggttgctgctatcgcctttcaggccgatcgggaagacttcttccaggtcgccgtgcggacgcgggataacgtgtacagataccagctcgccgatacgctgtgccgctgcggcacctgcatcggtcgcggctttacaggctgcaacatcaccacgaaccatggcagtacacaggccgccgccaatctgcttaacaccaaccagcttgacgcgcgcagctttcaccatcgcgtcagaagcctcaatcagtgcaaccaggccccgggtttcgatcattcctaatgcttccattgtgctttcctctttatcagggtccagaacgggaccgttcattcaaccagtgtttgtaaactgctttcgcggttcacttctgtctgacgcggcacagctgccaccagcgccagctcgataatttcctgcacgctacaaccacgagagagatcgtgcatcggcgcggcaagtccttgtatcagtggcccgacggcacgatatccgccgagtcgttgtgcgattttgtaaccaatatttccggcttccaggctcggaaaaaccatcacattggccttgccctgtagcgggctggcaggcgctttttgcgccgccacttccggcacgaaggcggcgtcaaactgtaactcgccatccaccaccagctttggtgcgcgctcacggacgatttctgtcgcctgctggacgttagcaacacaggggtgacgggcgctaccattgctggaaaagctcagcatcgccacgcgcggctcttctccggtgatggcgcgccaggtttcggcactggcaagcgcgatatccgccagctgcgccgccgtcggctgtggcaccacgctgcaatcggcaaagcccaacgccgggccgctgtactgtggcaacatcaggaaaatggaagagagcgttttacagcctggctgcaagccgataatgcgtaatccggcacgcagcacatttgccgtggaagagaggttgcccgcgatacagacatccgctttaccggcgctgaccattgctgcggcgaacatcagagggtcggtaagtttttccagcgcatccggcggcgttttttcgcccgcgcgggccagccagcgatgagcaaattcttcccgcattgcgaggttgccatgcggatcaatcacctgtagcccgtccatcgccacgccgtgactgagcgcaaactgacgaagttcaaacggattggcgaccagaatgggcgttgccagaccttgttgatgtaaatattgcgcggctttcagcacacgttggtctaacgcatccggaaaaaccactctggcgggcgctcgcaacgccagttcacgacaacgttcaataatcattgcgtttcccccagtcgttgttggatctgcttcaccgttagcggctgcttcgttacgctcaggatcatcatcacgtagaccgtgctgctaaggcggttcagcgcctgcaaaatgtccgggcgtaatacttcaaagctgcgggtgataaagacctgcgccgctacggtttcggtttcccgcactttggtgcgtagcagattgagcaacgcagcatcgcgcccgtggctggcttccggcaccagatgatcgtggtcgagatagcgcagcggctgatgagaaagccgatgcagatcttcgtcagaaagcccgacaatcgcctggcagcccagcggttcccccagcgcatcggcgcgcataatgttgccaagacggctacggatatccgccagccacggctgccacggttccgccagttcaatttgcagccacactgccagcgcaatggtgctgtcgagaaccgcgcgaaaacccagacgcggatcgcttttggcgaccattttttccgcgctcaggtgagtcagcgtatccggcttttttgccaccggctggcgacacagttcgcagcacgcctgcggatgttcatcgctactggtcagcccatgaacgggctgcggctgctgctgttcatcgtcaacaaacaggcggccctgctcgtcaataaacttgatgcgcagatggcggctttccagcaactcccgggcagagggcgtcaggcgactgtccgcagggagatggatctctgcgccttcgctgagcgtatggttcgctcttagccatgcttcggtgatgaaatctttcatagggattgccagttagccggccaggcgacatacaggaatttcacgctggatgtcgtaccaaattcgatgctggagcctttcgggataaacatcacgtcgcctgctttggcgatcatggtttggccttcgtggcgaacatgcagctccccttccagcaccatgtcgatttcgtcgtagttcagggtccacgggaagaatgcgttctcccactgcataaaaccggcggccatgctgctgccgtcgtctccggtcacaagatcagtcaagcccacgcaatgcggctctgcgccgtcgaaacgaccaaacttgacgctactgccatcaatcactttgatgccgcctttgccggtcacgcttttgaagctcggctgcattgcgccctgctccaggctctgtttttccttcatcactttttccatcagctgtgcgaccaggctttcggtaaactggccttccggcagctgggcaatgatggtttcgcggatgcgctggctttcggttttgtcggctggcacgctggcgggcacggacgccgttaccgggatgctttcatcacattcggtgatggtaaaacccagtagatccgccacttcacgggcttccggggtaataatgctggcgcgcagaaccacggacattgcctgttcgccgcgcgcgtgtgcttcacgaatatcattcgctgtgatgagttttttcacctgcttcctcctgtttggtgagagatgccagataatccaccagttgctgcacgctttgcgggtcgtggctgtttagctcgaacatcggctcttcgaaacccgtctcaagcaataactttcgcgttgcggcgacgtcagcatctggcatgtccgttttactgatgacggcgatttgccgtttgctgacgccaatatccagcaacccggcaggcaaccgactttccgggtcatttgcgccatggacatagatcagcatgtctacatcctgtagcgtggtaattaaggcgtgataccagcggggatggttaaaatattcacccggcgtatcaatatcgcccttatcattaaattccacggcctgtgtttttctggcgagggtataattcccctgcaacgcattaaataacgttgtttttcctgccccgacgctacccacaaacgcaattcgtttcatgaatgcctcgtattaacttttggtcatttcacaaagcgtataatttaataagcgacctaaaccgctgacggtttgacttaacgcttcttctactgcgcccacgctgccataaatcaccaatgcaccgctgaatcggtcgagaaaaccgatatgcacatcagcggctttcagcgctaaatcaccggcgatcatcgccgtttcgccgggagttagcgtcataatgccaattgcgcccgcatccggaacgccgattttcttcgccagttcctcaccgggatgcgcgatgagatgcgccagtgtgacctgtttgccgggcacaaattcctgaatgatgcgttctttatccatgagtcgccgcctgtgaaaaactttcgtgtatcgtgacaatttttcgtcagagtaaataacaaaattcggcaagcgcgtttaaaaggtgaggtagatcactaagaatggagagatattcgctgtggtgcataaactttcatatgcaacgcatgaatataaataaaataatatcgagatattatatagactgcttttttttattattcgcaaactcagtaataagctttactaatatattgcagctaaactgcttaccctgaatattcagggtaagcgtgagagttaaaaaaaattacagcggttgggtttgcgcttctaccacggccagcgccaccatgttgacgatacgacgcacgcttgcgatcggcgttaacacgtgaaccggtttcgccacacccatcagcaccgggccgacagtcacaccttcgctgctggaaacacgcagtaagttgtaactaatgcgggcagcttccatgttcggcatcaccagaatattggcggaacctttcaaagagctgtccggcatacggtcgttgcgaatcgcttccaccagcgctgcatcgccgtgcatttcaccatcaatcatcagttctggtgcacgttccctgaccagttccagcgcctgacgcattttgctgctgctcgggcagtcagaagaaccaaagttggagtggctcaacaaagcaacgcgcggctcaataccaaaacgacggacagtttctgccgccatcaaggtgatctccgccagctcttctgcatccggttcatcattaacatatgtatcggcaataaaggtgttaccactcggcagcagcagcgcgttcatggcacctgcggtgtgaacgccatcgcgataaccaaagacatttttcaccacgctaaaatgttcatgataatcacccaccgtaccgcaaatcattgcatcggcttccccacgctgaaccatgatcgcgccgatcactgtcgggttactgatcagcgcccgctgcgcctgttcctgagtgacgccgcgacgcttcatgatctggaagtattcggtccagtactctttaaagcgcggatcggattcgttattgacgatctcaaaatcaacgcccgctttgatctgcaagcccagtttctgaatgcgcatttcgatcacgttcggacgaccgataaggatcggtttcgccagtcccagcgttaccagttcctgagtggcatgcagaacgcgcgcctcttccccttccggcagaacaacgcgcttcggcgctttgcgagcctgggagaaaatcggcttcataaacaggttggttttgtaaacgaactcagtcagcttgtcgatgtagacgtcgaaatcagcaatcggacgagtcgccacgccgctctccatcgcggctttagcgaccgcaggagcgatcttaacgatcaagcgcggatcaaacggctttggaatgatgtattccggaccaaagctcagatcctgatcgccatacgcactagccaccacttcgctctgttccgcatgggcgagttctgcaatcgcacgtaccgccgccagtttcatctcttcgttgatggcggttgcgccaacgtccagcgcgccacggaagatgaacgggaagcacaggacgttgttcacctggttcggatagtcagaacgaccggtgcaaatgatggcatccggacgcacttctttcgccagcggcggcagaatttccggttccgggttcgccagcgccaggatcattggcgcacgagccattttcttcaccatttcctgggtcagcactttcgggccggaacagcccaggaaaatatccgcgccttcaatcacatcatcgagggtacgtttgccgtcatccaccaccgcatatgcggctttggtttccgccatgtttggctcacggccctgatagataacgcctttactatcgcaaaccacgatgttatgtttttgcagacccagcgctaccagcaggttcatacaggcgattgctgcggcacccgcgccggaaaccaccatccgcacgtcggagatgtttttctccaccacgcgcaagccgttgaggatggcggcagtgctgataattgccgtgccgtgctgatcgtcgtggaataccggaatattcatccgctcgcgcagtttctgttcaatatagaaacattctggcgctttaatgtcttcgaggttgatgccgccgaaggttggttcgagcgcggcgacaacttcaataaatttgtccgggtcgagttcgtcaacttcaatgtcaaatacatcaatcccggcgaatttcttaaacagaacgcccttgccttccatcaccggtttgcctgccagcgcgccaatgttgcctaaccccagcaccgccgtaccgttagagatcaccgccaccaggttacctcgggcggtatatttgtaggcttttaacgggtctttttcgatttcaagacaaggtgcggcaacgcctggactgtaggccagcgccagatcgcgctgtgttgccagaggcttggttggagaaacctggattttccctggaactggaaattcatggaaatcaagtgcactttgttttaactggtcatccatttggttgttcctttcacgtaacgttcacaaataaagtgtgtgggcaacagcccctgcccacaacgtggcgcacattattaccctgccggagtctacagactttgagcaagtccaaactctcaccattaatataatgttttggtaataatcctataacactgatgttacctgcttaatccagcaataccatgcctgtctgctatgcttttttgatgcgtttagcgaaatttctcagaagtgtgaattaacgcactcatctaacactttacttttcaaggagtatttcctatgaacgagttagacggcatcaaacagttcaccactgtcgtggcagacagcggcgatattgagtccattcgccattatcatccccaggatgccaccaccaatcctagcctgttactcaaagctgccggattaagtcaatatgagcatttaatagacgatgctatcgcctggggtaaaaaaaatggcaagacccaggaacaacaggtggtcgcagcgtgtgacaaactggcggtcaatttcggtgctgaaatcctcaaaatcgtacccggtcgcgtgagtacagaagttgatgcacgcctctcttttgataaagaaaagagtattgagaaggcgcgccatctggtggacttgtatcagcaacaaggcgttgagaaaagtcgcattctgatcaagctggctagcacctgggaaggaattcgcgcggcagaagagctggaaaaagaaggtattaactgcaacctgacgctgctgttttcttttgcacaggcacgggcctgtgcggaagcaggcgtttttctgattagcccgtttgtcgggcgtatttatgactggtatcaggcacgcaagccgatggacccgtatgtggtggaagaagatccgggcgttaaaagcgtgcgcaatatctacgactactataagcaacaccactatgaaaccattgtgatgggcgcgagcttccgtcgcaccgaacaaatcctcgccttaaccggctgcgatcgactgactatcgcaccgaatttactgaaggagctgcaggaaaaagttagcccagtggtacgtaaattaatcccaccttctcagacgttcccacgcccagctcccatgagcgaagcggagttccgttgggagcacaatcaggatgcgatggcggtagaaaaactgtctgaaggcattcgtctgttcgccgttgatcaacgcaaactggaagatcttcttgccgccaaactataaaccagccacggagtgttatatgtcccgaaaagaccttgccaatgcgattcgcgcactcagtatggatgcggtacaaaaagccaactctggtcatcccggcgcgccgatgggcatggctgatattgccgaagtgctgtggaacgattttcttaaacataaccctaccgacccaacctggtatgatcgcgaccgctttattctttccaacggtcacgcgagcatgctgctctacagtttgctacatctgaccggttacgacctgccgctggaagaactgaagaacttccgtcagttgcatagcaaaaccccaggccacccggagattggctatacgccaggcgttgaaaccaccaccggcccgcttggacaaggtttggcgaacgccgtcgggctggcgatagcagagcgtacactggcggcgcagtttaaccagccagaccatgagatcgtcgatcacttcacctatgtgtttatgggcgacggctgcctgatggaaggtatttcccacgaagtctgtagcctggcaggcacgctgggactgggcaagctgattggtttttacgatcacaacggtatttccatcgacggtgaaacagaaggctggtttaccgacgatacggcaaaacgttttgaagcctatcactggcatgtgatccatgaaatcgacggtcacgatccgcaggcggtgaaggaagcgatccttgaagcgcaaagcgtgaaagataagccgagcctgattatctgccgtacggtgattggctttggtagcccgaataaagcaggtaaggaagaggcgcacggcgcaccactgggggaagaagaagtggcgctggcacggcaaaaactgggctggcaccatccgccatttgagatccctaaagagatttatcacgcctgggatgcccgtgaaaaaggcgaaaaagcgcagcagagctggaatgagaagtttgccgcctataaaaaggctcatccgcaactggcagaagagtttacccgacggatgagcggtggtttaccgaaggactgggagaaaacgactcagaaatatatcaatgagttacaggcaaatccggcgaaaatcgctacccgtaaggctagccaaaatacgcttaacgcttacgggccgatgctgcctgagttgctcggcggtagcgcggatctggctcccagcaacctgaccatctggaaaggttctgttagcctgaaggaagatccagcgggcaactacattcactacggggtgcgtgaatttggcatgaccgctatcgccaacggcatcgcgcaccacggcggctttgtgccgtataccgcgacgttcctgatgtttgttgaatacgcccgtaacgccgcgcggatggcggcactgatgaaagcgcggcagattatggtttatacccacgacagtattggcctgggcgaagatggtccgacgcaccaggctgttgagcaactggccagcctgcgcttaacgccaaatttcagcacctggcgaccgtgcgatcaggtggaagcggcggtgggctggaagctggcggttgagcgccacaacggaccgacggcactgatcctcagtaggcagaatctggcccaggtggaacgtacgccggatcaggttaaagagattgctcgtggcggttatgtgctgaaagacagcggcggtaagccagatattattctgattgccaccggtagtgagatggaaattaccctgcaagcggcagagaaattagcaggagaaggtcgcaatgtacgcgtagtttccctgcccagcaccgatattttcgacgcccaggatgaggaatatcgggagagcgtgttgccttctaacgttgcggctcgcgtggcggtggaagcaggtattgccgattactggtacaagtatgttggtctgaaaggggcaattgtcgggatgacgggttacggggaatctgctccggcggataagctgttcccgttctttggctttaccgccgagaatattgtggcaaaagcgcataaggtgctgggagtgaaaggtgcctgatggtgattgccggatgctgattgccggatgcgacgctgacgcgtcttatccggcctacagcgtcttatccggcctacatgtcccgccattttgtttaacgggtgatccacaacgtgggccaggcgtctggcccatgccagttatcgcaggtgggttctgcggcgtaacgcaccaggcgaaaacgctgaccgtcaaagcgccagcgcgcctgaatgccacaatcgcttaatccgcgccctttcgctaaggtcaccagttcacggcttttctcatcaaatgttgcgttcatcagttccagttcattcgtctcctgaccgttgttgaacggcaaacgcaaccgaaccgggcggctagctagtggctttttacggctcacaatccatgccaaatcaatggtgttataggcccctgcctcacagctaatcatcatcagcgctttatcatcagtcagcgcagtgacattcacctcacgacgcaatggatcaaggctgcagcgcagaccattcatccgccagtttccataatccagcaaatcgttgcgttcttcgagactgagtggcgtcggcgttgggttaaccaccgcgacctctttcagcgcaggcgcgggcggtacgctgagcggcggttcgtcccctttcttgatccacgcggtttcactgccaacgcgcttttgctgagcatcaataaacaacaacgctgcttttaagccactcagagaaatggtctgatcgccatcgcgtaaggtgattgccttcccttcctgaatcatctgcaaaaacgcggtgatggttgccgtatcatcggttactaataaccatggactaatccgccacttgtcaccacttaacgccaacggctcgccatctaacagcagccgtggcgctatctccccttcactcgcctccgggctcttcaatccgccgcgctcaatacgtaaaacggcatcggtatgcgccccggcgctgcggctcagggtcatcaccagtccattatgatcgcccgtattacgcgccacgcagaaattttggttattacaggtgacctgccagtcggaaaacgcccgttgcgctggtgccgcccacaccaaagacgtcggcaacaaagcgaaaaaaaagagaaggaaaatgcgatagcgcatggacggtacgaccccagaagttcaaacaaacagcacaagtcgtatcttcgttgcgcaggtagcgcggctcaatcggatttgtcggattgagccaataataaacaacgaaatattattgttatttttcagtccattaaatgactcgtttgcaaatagttaagcaataacaccgtcttaccgtcacgtatctcgccggttttgatcatctccagcgcctggctgaacggcagctcgagcacttcaatatcttcatcttcgacaccgccaccggcgttagcgcgctgattgtcactgtattcggcgataaaaaagtggattagctcagtcacaccgcctgggctcatatacagttcaaataatttgcgcacttcacccacttcatagcccgtctcttcaatcgcttctttgcgaatacacacttccggttcgtcgttatccagcagcccggcgcagctttcaatcagctgcccgctttcattgccattaacccaggtagcgacacggaactgacgaatcagaaccacggtctttttcttcgtgttgtacaggaggatcgtcgcaccattgccgcgatcgtacacttcacgtttatggcggataacttcgccgtctttgcgcgtgagatcgtaagtaatgttgtgcagggtgaaatagttatcggagagaattttgtctttaatgagggtgatttgttgcgtcataccgactccacagcgcgaaatgaacaattatcttacgctgtgaagtcgggtttgtctgcgcaggctatcagtgagatttgacactttttacccccagccagtcaataatcccctgtgccgcatgacgtccttctgccattgcggtaaccaccagatccgcaccacgcacggcgtcaccaccagcgaagattttcggattggtggtctggtaacggtactggctttccacatccgcgatgatgcggccccatttgtctaccgttacaccgtggctctccagccacggcatcccgtgcggattgaagccaaacgccataatcaccgcgtcggctggcatgacaaattcactgccttccaccggcactggacgccgacgcccctgggcatccggctctccaagacgcgtgcgcaggaaacgaatcccgcagacgtgaccttgttcattcagctcaagcgccaccggctggacgttaaattcgaagttggccccctcttcgcgggcgttcttcacttctttcttgctgcctggcatgttagcttcatcacgacgataagcgcaggtgacgttactcgcgccgtggcgcagtgcggtacgcacacagtccatcgcggtgtcgccgccgcccagtaccacgacgttaagtccggcggtattgataaacggctcttccggtagctcttcgagccccatcacctgtttagtgttggcaatgaggaacggcagcgcgtcataaacgcccggcgcatcttcattgggtaaacccgctttcatggaacggtaagtgcctacgccaacgaagaccgcgtcgtattgttccaaaaggctatccaaagagacatctttacccacttcacaattgagttcgaagtgaatccccatcgcgctgaagatttcccgacggcgtgccagcagggatttatccagtttgaaagaaggaatgccgaaagtgagcaagccaccgatttctggatggcgatcgtacaccgtcacccccacgccattgcgggtcagaacatccgcacaggccagccctgccggacctgcaccgataatcgccacccgcttgtccactttggtgacatggcttaagtcaggacgccaacctttcgccaacgcctgatcactaatgtagcgttcaatgttgccgatagttaccgcgccgtgctcatcgcgaatagtacaggcaccttcacacaaacggtcttgcggacaaacgcgtccggtaatttccggcagggtgttggtctggtgagaaagctcgacggcggcgtcgatgtttccggctttcaccagttcaatccactgcggtatatggttatgcagcgggcaggtccattcacaaacgctgtgctcgccgcacttaaggcagcggctggcttcccgttgtgcctggtcggcgcgaaatggcagataaatttcatcaaaaccggttttgcgcgcttcaatcgccagtttatccggctcgccacgcgcgggcgttgcctgcatttgttcgactttactcattaccggcatttcttgcgccgcggtactggcatgccacggttgatgttcctgacgcgcggtgcgcaagcggcgggatttcgccatgccggagagtgcgacgtcagtgaccagttgcagcgcgtccgccgggcaattctcaacacaggcaggaccgttttcgcgccccgcacaaaggtcgcatttatgcgccgtggcttttacttttcctgccgcgacgggtgtcaggacgatttgcatcgtaccaaaaggacaggccaccacgcaggatttacagccaatacacttttgctgattgacctgaatgctgtcatcaacgtggctgattgcgccattagggcagctacgggcgcagggcgcatcttcacaatggtgacaggtcactgcactacgttgctgttgatgtttgataaccgtaattcggggatgaaaatggtgttggctcaggacatgttgctcatcattgtgagccatgacacaggcgatttcacaagcatgacaacccagacattgctgactgttggccataataaaacgattcataacgaccttcttttttggttgtaaaaaccttattctttatatgagtgttgttattacccgacttacaggggaatcggcaatgttcatgtgcccagaataagtaactatttcgctataaactgtggcagatcaaataatcccatcactgactaaattgcgtttcagcgaactggaacattaatgattttttgtggagaagacgcgtgtgattgttaaacgacccgtcagcgccagtctggcccgggcctttttttacattgtgctgctgagcattctttccacgggtatcgctctgctaactctggcgagcagtttgcgcgacgctgaggctatcaatattgccggaagcctgcgtatgcagagttaccgcctgggctacgacttgcaaagtggcagtccacaactcaatgcacatcgccagttatttcagcaggcactgcatagtccggtattaaccaacctcaacgtctggtatgtgccagaagcagtaaaaactcgctatgcgcatctgaatgccaactggctggagatgaataatcggctcagcaagggcgatttgccgtggtatcaggccaatattaataattatgttaatcagatagacctgttcgtactggctttacagcactacgctgaacgcaaaatgctgctggtggtggcgatttccctggctggcggcatcggtattttcacgctggtcttttttactttgcgccgcatacgccatcaggtggttgccccgctgaatcagctggttaccgccagtcagcgtattgaacacgggcagttcgacagcccgccgctggataccaacctgccgaatgagcttggtctgcttgcaaaaacctttaaccagatgagcagcgagctgcataaattgtaccgtagcctggaagcgagtgtagaagaaaagacccgcgatctccacgaggccaagcgtcgtctggaggtgttgtatcagtgtagccaggcgctgaacactagccagattgatgtgcattgtttccgccatattttgcagattgttcgcgacaatgaagcggctgaatatctggagttaaatgtcggtgaaaactggcggattagcgaagggcaaccaaacccggaattgccgatgcagattttaccggtgacaatgcaagagacggtttacggcgaactgcactggcaaaatagtcacgttagtagtagtgaaccgctgcttaacagcgttagcagcatgctgggacgcggtttgtactttaatcaggcgcagaagcattttcagcaattattgttgatggaagaacgtgcgaccatcgcccgcgaattgcacgacagcctggctcaggtactttcttacttacgtatccagttgacgttactgaagcgtagcataccggaagataacgccaccgcacaaagtatcatggccgatttttcccaggcgttgaatgatgcttatcggcagttacgcgagctgttgactactttccgcctgacgctgcagcaggcggatctcccctccgcattgagggaaatgctggatacgttacaaaatcaaaccagcgccaaactgaccctcgactgccgtctgccaaccctggcactggatgcgcaaatgcaggtgcatttgttgcaaattattcgcgaagcggtgctgaatgcgatgaagcacgccaacgccagcgaaatcgccgtcagttgcgtcaccgcgccggacggcaatcacacggtttatatccgtgataacgggattggtatcggtgaaccgaaagaacccgaaggtcattatggtctgaatatcatgcgcgaacgcgcggaacggctaggtgggacgctgacttttagtcaaccttccggcggcggcacgttagtgagtattagctttcgctctgcggagggtgaggaaagtcagttaatgtaatgcctcctactgaccaaagaatacttgcacttaaggttcagtataaaagggcatgataatttacattaactcctttttttctccacgattggctcgtaccttgccgctacagtgaagcaagtcaagcctacaacgatacgcagaaacacgaggtcctcttttaatggcgaatttctttattgatcgccccatttttgcctgggtgctggcaatcctgttgtgtctgacaggtaccctggcgatttttagtttgcccgttgaacaataccccgatctcgcgccaccgaatgtgcgagtgaccgctaactatcccggcgcaagcgcccagacgctggaaaacaccgtgacccaggttatcgagcaaaatatgaccggcctcgataatctcatgtatatgagttctcagagcagtggcaccggtcaggcatctgtcactttaagttttaaagcaggcaccgatccggacgaagccgtgcagcaagtacaaaaccagctgcaaagtgccatgcgaaagttaccgcaggcggtgcaaaatcagggcgtgacggtgcgtaaaaccggcgataccaacattctgaccattgccttcgtctctaccgatggtagcatggataaacaggatattgctgattatgttgccagtaatattcaggacccgttaagccgcgtgaatggcgtcggggatatcgatgcctatggtagccaatattccatgcgtatctggctggacccggcgaaactcaacagtttccagatgacggctaaagatgtcactgatgccattgagagtcagaacgcgcagattgcggttgggcaacttggtggtacaccttccgtcgataagcaggcgctcaacgccaccattaacgcccagagtctgctgcaaacaccagaacagttccgcgatatcaccttgcgggtcaatcaggacggcagtgaggtaaggctgggcgatgtcgccaccgtcgaaatgggggcggagaaatacgattatcttagccgcttcaatggtaagccagcctccgggctgggggtaaaactggcctccggcgctaacgaaatggcgacagcggagctggtgctcaatcgtctcgacgagctggcgcagtatttcccgcatggactggaatacaaggtggcgtatgaaaccaccagctttgttaaagcctccattgaagacgtggtgaaaacgctgctggaagctatcgctctggttttcctcgttatgtatctgttcctgcaaaacttccgcgccacgctgatacccactatcgccgtgccggtggtgttgatgggaaccttctccgtactttacgccttcggttacagcgtcaacaccttaaccatgttcgcgatggtgctggcgatcggtctgctggtggatgacgccatcgtggtggtggaaaacgtcgaacgtattatgagtgaggaaggactcactcctcgcgaagccacacgtaaaagcatggggcagatccagggggcactggtcgggattgcgatggttcttagcgcggtatttgtaccaatggccttcttcggcggcaccaccggtgccatctatcgccagttctctattaccattgttgcggcgatggtgctgagtgtactggtagcgatgatcctcactccggctctgtgtgccacactacttaagccactgaaaaaaggtgagcatcatgggcaaaaaggcttttttgcctggtttaaccagatgtttaaccgcaacgccgaacgctacgaaaaaggggtggcgaaaattctccaccgtagcctgcgctggattgtgatttatgtcctgctgcttggcggcatggtgttcctgttcctgcgtttgccgacgagcttcttaccgctggaagaccgtggcatgtttactaccagcgtacagttgcccagcggtagtacgcaacaacagaccctgaaagtcgttgagcaaatcgagaaatactacttcacccatgaaaaagacaacatcatgagcgtgtttgccaccgttggttctggccctgggggtaacgggcaaaacgtggcgcgaatgtttatccgcctgaaagactggagcgaacgcgacagtaagaccggcaccagctttgccattatcgagcgtgcaacgaaggcgtttaaccaaattaaagaagctcgcgttatcgccagcagcccgccagcaattagcggtcttggtagttctgcaggttttgatatggagttgcaggaccacgctggagcgggtcacgatgcgctgatggcagcacgtaatcagttgctggcgctggcggcggaaaacccggagctaacccgtgtgcgccataacggcctcgacgacagtccgcagttgcagattgatatcgaccagcgtaaagctcaggcgctgggcgttgctatcgacgatattaacgacacactgcaaaccgcctggggtagcagctatgtgaatgactttatggatcgcggtcgcgtgaagaaagtctatgtgcaggcagctgcgccgtatcgcatgctgccagatgacatcaatctctggtatgtccgaaataaagatggcggcatggtgcccttctctgctttcgcgaccagtcgctgggaaacaggcagcccgcgtctggaacgctataacggttattctgcggttgagattgttggggaagccgcaccgggggtcagtaccggtacggcgatggatattatggaaagcttagtgaagcagctgccaaacggctttggtctggagtggacggcgatgagctatcaggagcggctttccggcgcgcaggctccggcgctgtacgccatttccttgctggtggtattcctgtgtctggctgcgttgtatgaaagctggagcgtgccgttcagcgtaatgctggtcgtgccgctgggggtaatcggcgcgctgctggcaacctggatgcgcgggctggaaaacgacgtttacttccaggtgggcctgttaacggtcattggtttaagcgcgaaaaacgccatcctgatcgtcgagtttgctaacgagatgaaccaaaaaggccacgacctgtttgaagcgacgctccacgcctgccgtcagcgtttacgcccgattctgatgaccagcctggcatttatcttcggcgtattgccaatggcaaccagcacgggtgccggttccggtggtcagcatgcggtgggtactggcgtaatgggcgggatgattagcgccactattctggctatttacttcgtgccgctgttctttgtgctggtgcgccgccgcttcccgctgaagccgcgcccggaataagcaataaaaaaggcgacatgccaatgtgtcgcctttttcaactttccgattaagaacctgctcagcgggttcttgctgtttgtactttgtctcaggaattacttacgaagcataacttcgataaagtctttccagttccccagttcacgttcaatcataacaacctctcttataattatgggtattctacggaaacaatataccgtggtgaagctaatttactcgattgctgcgatgactacctccgggggacaaatcttatgtaaatactatggtcctgcggtgatgatttgtatgtgatacacagcaacatttcgagatattcatacggcatctaatactgatttaattctggttaaaatacagacagataacaagatgaatattcttaatgtttacgttaaaaatgtttaatattatttaatagttgttaatttgaatacttcgataatgttatatttcctgataatcatttgcaggcaaaatgttttcacccttaaatgagtatttattctcataaatcgaaaaaggattcattatggttacactttacggtatcaaaaattgtgacaccattaaaaaggctcgccgttggctggaagccaataacatcgactatcgttttcatgattaccgcgtcgatgggctggacagcgaattattgaacgattttatcaacgaattaggctgggaagcgttactcaacacccgtggtacaacctggcgtaaactggacgaaaccacccgcaataaaatcaccgatgcggcctctgcggcggcattaatgactgaaatgcctgcaattatcaaacgtccattgctctgcgtgcccggtaagcctatgctgctgggtttcagtgattccagttatcagcaatttttccatgaggtgtaatctatgagctgcccggttattgagctgacacaacagcttattcgccgcccttccctgagtcctgatgatgcaggatgccaggctttgttgattgaacgtttgcaggcgatcggttttaccgttgaacgcatggactttgccgatacgcagaatttttgggcatggcgtgggcagggtgaaacgttagcctttgccgggcataccgacgtggtgccgcctggcgacgccgatcgttggatcaatcccccgtttgaacccaccattcgtgacggcatgttattcgggcgcggtgcggcagatatgaaaggcagcctggcggcgatggtggtggcggcagaacgttttgtcgcacaacatcccaaccatacggggcgactggcatttctgatcacctctgatgaagaagccagtgcccacaacggtacggtaaaagtcgtcgaagcgttaatggcacgtaatgagcgtctcgattactgcctggttggcgaaccgagcagtatcgaagtggtaggtgatgtggtgaaaaatggtcgtcgcggaagtttaacctgcaaccttaccattcatggcgttcaggggcatgttgcctacccacatctggctgacaatccggtacatcgcgcagcacctttccttaatgaattagtggctattgagtgggatcagggcaatgaattcttcccggcgaccagtatgcagattgccaatattcaggcgggaacgggcagtaacaacgttattccgggtgaactgtttgtgcagtttaacttccgcttcagcaccgaactgactgatgagatgatcaaagcgcaggtgcttgccctgcttgaaaaacatcaactgcgctatacggtggattggtggctttccgggcagccatttttgaccgcgcgcggtaaactggtggatgcggtcgttaacgcggttgagcactataatgaaattaaaccgcagctactgaccacaggcggaacgtccgacgggcgctttattgcccgcatgggggcgcaggtggtggaactcgggccggtcaatgccactattcataaaattaatgaatgtgtgaacgctgccgacctgcagctacttgcccgtatgtatcaacgtatcatggaacagctcgtcgcctgatgagtggttctgcaagaggaaataagcatggactggctggctaaatattggtggattctggtgattgtctttttggtaggcgtcctgctgaacgtgattaaagatctcaagcgcgtcgaccataagaaatttctcgccaacaagccggagcttcccccgcatcgtgatttcaacgataagtgggacgatgacgacgactggccgaaaaaggatcaaccgaagaagtaagctgagtgctcaaccgtaggccggataaggcgttaacgccgcatccggcaatggtgaacgatgcctgatgcgacgctcacgcgtcttatcaggccaggtaatctgtcttttacatcatttcaatcacatcatcatcgccaggcttaccgccacttagcgcttcgtcgaaataatgtttcggaatggtataacgcaagtgatccagggcaaattgcatactgcgattgtcgatcgcatggcctaaatcctccacgatatccagcgtcacgtcaccaccggcactgattaacgcttcctgcgccgcaaccgcatgcgccagatcgataaccggatcttcaccgccatgaatcaggtgaattgtcgtggctgtagacgcagtttccggcaggctcgcatagcgtccgttaaaagcaatgacgcgactagcaaggcccggttcggctttaatgctctccagcaccataatcgcgccttgagagaaaccgatgagcgccgtggcgttagcccctactccgctctgtttctgccagtagcgcaccgtttcaataaacgtcggcatgatcgcatccacacgcgcctggcgattatcttccgtaataccctgcacgctaaaccactgacgccccgccggattaccgctcggctccgcgccaccgacactcaccaccagcgcatcaggaaacagcggtgcaaaccagttgcctatttcccccattgccaccgggttatccccgacaccgtggaaaagcagtaacaactgttgcgcaggtttatccgggctttgaacaacaaaatggtcatgtttcatggcgaactccttaactgatgtcattaattttacgccgctgactcacaatgaccatgagataaaattgaaggagtcagtgaaataattgccattgcgttatgcgatcgcgcagacgctcagtgcgaacatcattaagtgcgaacagcgcctgcgcggcctcttcccgctgacggaccagtaacatcttgcggccactaagtttaagtgtggtacataactgcgcatcactggcgtttttctgtaaacgcccacgcagcgccggtaatgccagttcactggtttgtaacagacgcaataagcaacctaagctcgttaatagcggacgatgagcgaaagcaaaaccggccagttcaagccagtcgtcgtcagaaaggacggcatcgtttagtggatcaacaggaagcgtttcgccattccactgcgcgagagcttgcgcatcgcgacgtaaacggtaatgctcacgttcagccagctgtttacccgcatcactcatcggtaacagcgccatcgccgtatagcaaccgctgctggcttcccgatgattacccatccgcaccagcacaaaaccgcagcgttgccagaaacgccataactccccggtgtaaccaaaactcacgctaagatagtcgaggtcttgcgtatattgcaaagcaccagcaataagttgccgccctgtgccttcccgctgacgagccggatgaactgctatccggctgacccgccgtccacgcaatgtcgccgccagtggattgttgccgtgcgccgccaggctctgggccaccagattaccccgcgggcgacgaaaacctgcccataccgcctgactgagttgttgagataatccaccctcatccaccagccacagcgccccggcaatctcgttttcgccagccgcctgtaaaaaatgttgccctggtgcatccatcatccggcgtaaatccagcgggctagtccgatagtgcgcaccagacaagagctgataaacctttaacggcgtttctggatcgctttgccataacgtctgttcaaatgcggaaatgacaatattgccttgtggtgtatgggtgaagttttcatcgtcaaaaaccagtgcctcgctgaccattttttccagcgggcatccctgcgcccagcggatcggctgttgcagttcaaaacggtgtaaatgcggaaagcgagcgcaaaatttcagcaaaaaaccacgtccggtgccttcgtagccctgcaccgtagtggttaacaacgttcgaggaaaacggcttaccagttgatgcaacaatggcgcaggtatggctgcggcttcatcgaccaccagccagtcggcttgctcatcgctggctaacaaggcatccggcgcaataaagcgaaacttctcgcccgcaaattgtgccagtacatccgtactcgcttttgcgggcgcggtgacaatcgctctgcccgcaatacgagaaatgagttgccctgccaacgcgctcttaccgcgcccacgcgcagccgttaccgctgccacgcccggcggcatggtcattagctgctttaagagttgctgttgttctggttgtggtgcgccagtcgcggggtaccagtcagtacggggagtaaaatgcgccaagctgaatggctggttttgccgccagaggatagcctcgttatccgccgtaagtacgcgtttgagatgctggacaaaatgcggcgtcgcaatagggtcagggcaatcactccagcgcaggctgtcggcatcaggttggttttcccactcttcccatacagggagtaacaaaaccagccagcttcccgctttcaacgttccgctaagtgcggcaaaggcagcggcatcaaagccgtggcgggcgtcgaataccgcatgccggaactcgcgcccaagtaaagtttgtagtgcgctgggagaacagtggttttcagcatctggccgcgggctaatccacagccagtcgccaggtaaggcatcacgcaacttaagagtatgctcaaaacaccaaccctcttccccgctcaacaccagcaagcggcggatcccttcacgtttcatttgcgctgttaatgtgtgaagcgcagtcagttcagccatccctgccccggaagttaaatgcttttaccaaaagtattgcattgtgccggatcgccgctgtcgaaaccacgtttaaaccagctgtagcgttgctgagaagtgccatgagtgaaactgtctggtactactcgcccctgactttgctgttgtaaacggtcatcgccgatggcctgcgccgcgttcagcgcctcttccagatcgccggtttccagaacgccttgctgctgcatactatgcccccagacaccggcaaaacagtcggcctggagttccatacgcacagataagcggtttacttccgcctgcgtcgcgttttgttgcagttgacgaactttcggctcgatgcctaacagtttctgcacatgatgaccgacttcatgggcgataacgtacccctgggcaaaatcgccatccgcgccaagtttgtctttcatgtcatcatagaaggagagatcgatataaaccgtgccatccgccgggcaatagaacggccccattatggactggcccgccccgcagccggtacgcgtcattccacggtacatgaccagcttcggttgctgataggtcttacccatcttctcgaactgttgtccccaggtgtcttccgtggttgccagaatcacgctggtgaattttgcggcttcgtcttcatttgggctaatactccgcgtactttgttgttgggaaaccggctgcccggtcatcaacccggttaaatcaacaccatagtagcctgcaaccagcacgactatcagtaaaatcagcccgcctttaccgcttggcaggcgaaaaccgggaccgcccatagatggaccaccagagctgttgcgcctgtcttcaacattgtcactttcacgtcgcccttgccaacgcatagatacctcaacaatatattcattatagaaatgatcgtaggtggttcagaggaagattaccacaggaaagcgggatgaaatggcggaggaatgagcgttcaatgcatatattccgagagcggttgtcttgccgtgccagctgcacggcaagatgatgaacagaaaaatcagtccagctgtacacccaggcggcgggcgacggcttcataggcttcgatcaggccaccgaggctctggcggaaacggtctttgtccattttctccagcgtttctttgtcccacaggcggctaccgtccggggagaactcatcacccagtaccacttcgcctttgtacagaccaaattccagcttgaagtcgaccagaatcagaccagcatcatcgaacagttttttcagcacgtcgttcgctttgtaggtcagctctttcatacgcgccaggttctctttgctcacccagccaaaggtttcgcagtaagattcgttgaccatcggatcgtgcatggcgtcgtttttcaggaacagatcgaacagcggcgggttcagctcaataccttcttcgattccaagacgtttcaccagagagccagcagcacggttacgcacgacacactcaaccggcaccatatccagctttttcaccagacattcggtatcggagagcagacgctccatttgagtcgggatacccgcttcagccagtttgctcataatgaagtagttgaacttgttgttcaccatacctttgcgatcaaactgctcaatgcgcgcgccatcccctgcactcgtatcattgcggaattcgagcaccaacaggtccgggttttccgtgctgtatacggttttcgctttaccacgatacaactcagcttgcttttgcatctttatcactcctgggtgtgaattaacgttttaaaatcttttgctgtctggtgtgccggatgttttgtcggatgcggcgtgaacgccttatccgaactacgtccgacaaacaaatttcgtgcgaattaccgctaaaatcgcgttttcctgcagacgcacacgtttgcgtatcatatcagaaaaaagggccggatgattccagccctgtatttttacttgctaaacgcagcctggaagacagctaccagcgcgtcgttctgactctgagtcagagtatgacctttcggatcgatgaactgtaggctgctgcggttatctaaatcgccaacctgcagtttatagtcaccggatgccaggcctggatcgctcgcgcccagttcctgccagtcgctgtcagacagcggcttataagttacggccatgttgccctggctacgggtgctgtcggtcactttcatgcccactttttccagcgccgctggcagacgttgccaaaccacattgaacggcccgcgtacgaccagcattggtaaaccggtgtcatcagctgcactttgtacgtccatagtggtggaggcacgattttgcgcagcgttcgcggcgtcagtggcagatttatccagaccggcggaaataacgttcatcatctccgtgctgtaacgctgcatggaagccgcgtctgcaaccggtttgcccgcctgttccaggttcagcagtttaaccgtaaccgcctgctgataaccctgcggcttaacagagatttgataacgaccacgatactgctcgtcttcgtccagacggttccattgtacccaatcggtggtcagtgtctgaccagcatcatcacgttgggtgatggtgtagtttttcgcctgcagcacgctaaccacctgcggccacagagtattgccacgaccattttccaccagcaaactagcggtatcgcccgtgaactgggtacgcgcgccagaaaccagtgccagcggctgggctggtggacgaatgtccagcgccttaccgacagcaccactaccgttggtcaccgggattgcataatcaccggaggtcaccggcaaaatcattccagccggggcatgaagctccgcaagcggtgccgcttccaggtaggcttcatcaccactgacctgacgcttatagcgactgtcagaactacaggcagcgagtaataaaacaaggctaacacccgcaacctttgccaggcggctcttttgaacagagtaagccatcaaatctccctaaactttacagcaaaccggcatgcttaagcgccgctctgaccgtctcacgaccactgtcggtgattggtgtcattggcaggcgcagcgtatcggtcgccacaagacccagttccttacatgcccatttcaccgggattggattgggttcgacaaatagtttgttgtgtaatggcatcagacgctgattaataacgcgtgcctcggcaaaatgcccttctgctgccagtttgcacatctgggccatatcacgcgctgcgacgttagccgtaacggaaataaccccatgaccgcccaattgcatgaagtccagcgcgctcgcatcatcgccgctcagcagaacaaaatcatcactaaccagctctttgatctggtttacacgcgttaagttccctgttgcctctttgattccgataatattttttactttcgccagacggcccaccgtttccgggagcagatcgcagccagtacgggacggcacattatacagaatttgcggcaggtcagtatgctcagcgatggctttgaaatgctgatacaaaccttcttggctcggacgattgtagtaaggggttaccgtcaggcagccgacgataccactgtcattgaagcgctgcgtcaggctaatggcttccgcagtagcgttagcgccggtcccggcaattaccggaatgcgcccatcagccagatccagcgtcatcatcaccacatcagcatgttcgtcatgatttaaggtagcggactcgccagtggtgccaacagaaacgatcgcgctagtaccgctggcgacatgataatcaatcagttttttcaagctagcccgacagacattacctttttcatccatcggagtaacaatcgcgacaatacttcccgtgaacatgggccatcctctgtgcaaacaagtgtctcaatggtacgtttggtatggcattaaaagcaagcagacagaaccgttctgattgttgtatgcatgtttttttatgctttccttaagaacaactcaccccttaaaggaataaccagtttgacactgagtagccaacattatctggtgatcactgcgttgggtgccgatcgccctggaattgtgaacaccatcacccgtcatgtcagtagttgcggctgtaatattgaagacagtcgcctggcgatgctgggagaagagttcacgtttattatgctgctttccggtagttggaatgccattactctgattgaaagtacgttaccgttgaaaggtgccgaactggatcttttaatcgtgatgaagcgcacgacggcgcgtccgcgtccgccaatgccagcatctgtctgggttcaggtcgatgtggcagactccccgcatttaattgaacgcttcacagcacttttcgacgcgcatcatatgaacattgcggagctggtgagccgcacgcaacctgctgaaaatgaacgggctgcgcagttgcatattcagataaccgcccacagccccgcatctgcggacgcagcaaatattgagcaagcgttcaaagccctatgtacagaactcaatgcacaaggcagtattaacgtcgtcaattattcccaacatgatgaacaggatggagttaagtaatgaatccactgaaagccggtgatatcgcaccgaaatttagcttgccggatcaagacggagaacaagttaatttgaccgacttccagggacagcgtgttctggtttatttctacccgaaagccatgacccccggctgtaccgtacaggcctgcggcttacgcgataacatggatgagttgaaaaaagcgggcgttgatgtgctgggtatcagcaccgataaacccgaaaaactctcccgttttgcggaaaaagagctgcttaactttacgctcctgtctgatgaggaccaccaggtgtgcgaacaattcggcgtctggggtgaaaagtccttcatgggcaaaacctacgatggcattcatcgcatcagcttcctgattgacgctgatggcaaaatcgaacatgtctttgacgatttcaaaaccagcaatcaccacgacgttgtgctgaactggctgaaagaacacgcctgattactttgctccattccgtgctggctgcgcttgcggccagcatacctcacttctcgtgatcaagatcacattctcgctttcccctgcgacacgggtgtcgaatccattttttgctgaacgttaatgaccatcatttttgtaccgttcagaatccagttaatacataacttattgaatatattgagttaatcagaatggcatcctttatgcaatatgaaatgcaatgtttcatatcattttcaaggagccgacatgaaccgctttgtggtggccgaaccactgtggtgtacaggatgtaatacctgtctcgctgcctgtagcgacgtgcataaaacgcaaggtttacagcaacacccgcgcctggccctggcgaagacgagtacaatcactgcccctgtcgtgtgtcatcactgtgaggaagccccttgcctgcaggtctgcccggtcaatgccatctctcagagggatgatgcgatccaactcaacgaaagcctctgtattggctgcaagctttgcgccgtggtctgcccatttggcgcaatcagcgctagtggaagccgtccggtgaatgcccatgcgcaatatgtttttcaggctgaaggcagtctcaaagacggcgaagaaaacgcgccaacacaacatgctttgctgcgctgggaacctggtgtccagaccgtcgcggtgaaatgcgacctgtgtgatttcttgccagaaggtccggcctgcgttcgcgcttgcccgaatcaggcgttacggctgatcaccggtgatagcctgcaacgtcagatgaaagaaaaacagcgccttgccgcaagctggtttgccaatggcggggaggatcccctttccctcactcaggagcaacgctaatggatgccctgcaattattaacctggagcctgattctctatctgtttgctagtctggctagcctgtttttactcggcctggacagactggctattaagctttccggcatcacaagcctggtgggcggcgtgattggcatcatcagcggaattacgcaattacatgctggtgtaactttagtcgcccgttttgcccccccttttgaatttgccgatttaaccctgcgaatggatagcctcagcgcatttatggtgctggttatctccttgctggtggtggtttgttctctctatagtttgacttatatgcgcgaatacgagggcaaaggcgcggcggcgatgggcttctttatgaatattttcatcgcaagcatggttgccctgctggtgatggacaacgctttttggttcatcgtgctgtttgaaatgatgagcctgtcttcctggtttctggtcattgccaggcaggataaaacgagcatcaacgctggcatgctctacttttttatcgcccacgccggaagcgtgctgataatgatcgccttcttgctgatggggcgcgaaagcggcagcctcgattttgccagtttccgcacgcttagtctttctccggggctggcgagcgcggtgttcctgctggcctttttcggttttggcgcgaaagccgggatgatgccgttgcacagctggttgccgcgcgctcaccctgccgcaccaagccacgctagcgcgttgatgtctggcgtaatggtcaaaataggtattttcggcatcctgaaagtagcgatggatctgctggcgcaaacgggtttgcctctgtggtggggcattctggtgatggcgatcggcgcaatctccgcgctcctgggcgtgctatatgcgctggcggaacaggatatcaaacggctgctggcctggagtaccgtcgaaaacgtcggcattattttgctggcagtcggtgtggcgatggtcggtctgagtctgcacgacccgctgctcaccgtggttggactgctcggcgcactgtttcatctgctcaaccatgcgctgttcaaagggctgctatttctcggcgcgggagcgattattagccgtttgcatacccacgacatggaaaaaatgggggcactagcgaaacggatgccgtggacagccgcagcatgcctgattggttgcctcgcgataagcgccattcctccgctgaatggttttatcagcgaatggtacacctggcagagcctgttcagtctaagtcgtgtggaagccgtagcgctacaacttgcgggtcctattgctatggtaatgctggcagtcactggtgggctggcagtaatgtgcttcgtaaaaatgtacggtattactttctgtggtgcgccgcgcagtacacacgctgaagaggcacaggaagtgccaaatacgatgatcgtcgccatgctactgctcgcggcactctgcgtattaattgcgcttagtgccagttggctggcaccgaagataatgcatattgcccatgcgtttaccaatacccctcccgccactgtcgccagcggaatagcacttgtacccggcacgtttcatacacaggtcacccccagtttactgttgctgttactactggcgatgcctttgctgcctggcctttactggctgtggtgtcgtagccgccgcgcagcgtttcgtcgcacaggagatgcctgggcatgcggctacggctgggaaaatgcgatggccccgagtggcaatggcgtgatgcagccgctgcgtgtggtcttttctgcgctatttcgtctacgacaacagctcgaccctacgctgaggctaaataaaggtcttgcgcacgtcaccgccagggctcagagcacagaacccttctgggatgagcgggtgatccgccccatcgtgagcgccacccaacggctggccaaagaaatacagcatctgcaaagcggcgactttcgtctctattgcctgtatgtggtcgccgcactggttgtgctgctaatcgctattgccgtctaaggaaatcaccatgagacaaactctttgcgacggatatctggtcatttttgcgttagcacaggccgtgattctgctgatgctaaccccactttttacgggtatttcccggcagatacgcgcgcgtatgcactcccgccgcgggccggggatctggcaggattatcgcgatatccacaaactgtttaaacgccaggaagttgcgccgacatctagtggtctgatgttccgcctgatgccgtgggtattaatcagcagcatgctggtgctggcgatggccttaccactgtttattaccgtttccccttttgcgggcggcggcgatctgatcacccttatctatcttcttgccctgtttcgttttttctttgctctttccgggctggataccggaagtccgtttgcgggagtcggtgccagtcgcgagttgacgctcggcattctggtcgaaccaatgcttattctcagtctgctggtattggcgctgatagcaggttccacgcatatcgagatgatcagcaatacgctggcgatgggctggaacagcccgctaaccaccgtactggcgttactggcctgtggttttgcctgcttcattgagatgggaaaaattccctttgatgttgctgaagcagaacaggaattacaggaaggcccgctgaccgaatattccggtgccgggctggcgctagcgaaatgggggctggggctgaaacaggtcgtgatggcaagtctgtttgtggccctgtttctgccctttgggcgcgcgcaagaactttctctcgcctgcctgctgactagtcttgtcgttacgctgctcaaggttttgctgatttttgtactggccagtatcgcagaaaacacgctggcacgcgggcgttttttactcattcaccatgtgacctggcttggcttcagccttgctgcgcttgcatgggtcttctggttaaccggtctgtaaggagcactgacggaatatggaaaatcttgctctgacgacgttattgctgccttttatcggcgcactggtcgttagctttagcccacaacgtcgggccgccgaatggggggttttgttcgccgcgctgaccacgctgtgcatgttgagtctgatctccgcgttttatcaggccgataaagttgccgtcacgttgacgttggtcaacgtgggggatgtggcgttgtttggcctggtcattgatcgcgtgagtacgctgattctgtttgtggtggtgtttctcggtttgctggtcacgatctactccacgggttatctgacggataaaaatcgcgaacacccgcataacggcacgaatcgttattacgcatttttactggtgtttatcggcgcgatggcgggactggtactctccagcacgctgctcggtcagttgttgttttttgaaattacaggcggctgctcctgggcgttgatcagttattaccagagcgataaagcgcagcgtagtgcactaaaagcgttacttatcactcatatcggcagcttggggttgtatcttgccgccgccacgctgtttttgcagaccggaacgtttgcgcttagcgcgatgagcgagttacacggcgacgcacgttatctggtttatggcggcatcctgtttgccgcgtgggggaaaagcgcccagctaccgatgcaagcgtggctaccggacgcaatggaagcgccaacaccgatcagcgcctatctccacgccgcaagcatggtgaaagtgggcgtttacatttttgcccgcgctattatcgacggcggcaatatcccgcatgtgattggcggcgttggcatggtcatggcactggtcaccattctttatggctttctgatgtatttgccacagcaggatatgaagcggttgctagcctggagcaccatcactcaacttggctggatgttcttcggcttgagcctctccatcttcggcagccggctggcgctggagggcagcatcgcctacatcgtcaaccacgcgttcgctaaaagcctgtttttccttgtagcaggtgcgctgagttacagctgcggcacgcgcttgttgccgcgtctgcgtggcgtattgcacaccctgccgttgccaggcgtgggtttctgcgtggcagcgctggcgattaccggcgtgccgccgttcaacggcttcttcagtaaattcccgctgtttgctgccggttttgcgttgagtgtggagtactggatcctgctgcccgccatgattcttctgatgattgaaagcgtcgccagtttcgcctggtttattcgctggtttggtcgcgttgtgcctggcaaaccgagcgaggccgtcgccgatgccgcaccgctgccaggaagtatgcgcctggtgttgattgtactgattgtgatgagcctgatttccagcgtaatcgccgcgacctggttgcagtaaggagatgatgaatgaccggttctatgatcgtaaataatctggcgggactgatgatgctgacaagcctgtttgtgattagcgtcaaaagctatcgcctgagttgcggattttacgcctgccagagtctggtgctggtgtctattttcgccactctcagctgcctgttcgccgcagagcaactgctgatctggtccgccagcgcctttatcaccaaagtgctgctggtaccgttaatcatgacttacgctgcacgaaatattccccagaacatcccggaaaaagcgttattcggtccggcaatgatggcactgctcgcggcgttaattgtcctgctttgcgcatttgtcgttcagcccgtgaagctaccgatggctaccgggctgaaaccggcgctggcggtagcgttaggtcattttctgcttggcctgctgtgcattgtcagccagcgcaatatcctgcggcaaatttttggttactgcctgatggaaaacggctcccatctggtgctggcgcttcttgcctggcgagcaccggaactggtggaaataggtatcgctaccgacgccatcttcgccgtcattgtgatggtgttactggcaagaaaaatatggcgtacccacggcacgctggacgtgaacaacttgaccgcgctgaagggataatgagatgagttattctgtgatgttcgctttactcctgctcacgccgctgctttttagcctgctctgttttgcctgccggaaacggagactttctgcgactcgcacggtgaccgtattacatagcttagggatcacactgctgctgattctggcactctgggtggtccaaactgccgctgatgcaggagaaatattcgctgcgggactgtggcttcatattgatggtctgggcggtttgttcctcgccattcttggtgtgattggctttctcaccggtatttacagcattggctacatgcgtcatgaagtggcacacggcgagcttagtcccgttacgctgtgcgattactacggtttcttccatctgtttttgttcaccatgctgctggttgttaccagcaataacctgattgtgatgtgggcggcgatcgaagccaccaccttaagcagcgcgtttctggtaggcatttacggtcagcgtagtagcctggaagctgcatggaagtacatcattatttgtactgttggtgtcgcttttggtctgttcggtaccgtgctggtatacgccaacgccgccagcgttatgccgcaggcagaaatggcgatattctggagcgaggttcttaagcaaagctccttgcttgacccaacattaatgctgttggcctttgtgtttttgctaattggctttggtaccaaaaccgggctatttcccatgcacgcctggctgccggatgctcacagtgaagcgccgagtccggtcagcgccctgctctccgccgtattgctgaactgcgcgctgttggtgctgattcgctattacatcattatttgccaagccatcggcagcgatttccccaaccggttgttgctcatcttcggcatgttgagcgttgccgtggcggcatttttcattctggtacagcgggacattaagcgtctgctggcgtactccagcgtggagaacatggggctggtcgcggtggagctaggcattggcgggccgctgggaatttttgccgcgctgctgcacatcttaaaccacagtctggcaaaaacgctgctgttctgcggttccggcaatgtactgctcaagtacggcacgcgcgatctcaacgtcgtctgtgggatgctcaaaatcatgccatttaccgccgtgctgtttggcggcggtgcgctggcgctggcagggatgccgcccttcaacatttttcttagcgaatttatgaccattaccgccggactggcacgtaatcacctgctgattatcgtcctgctgttattgctgttaacgctggtgctggcgggcctggtacggatggctgcgcgggtgttaatggcgaaaccgccgcaggccgttaaccggggtgatctcggctggttgaccaccagcccaatggtgattctgctggtcatgatgctggcgatgggaacgcatattccacaacctgtcatcaggatcctggcgggcgcttccactatagtcctcagtgggacgcacgatctgcctgcacaacgtagcacctggcatgattttttgcctagtggcaccgcatctgttagcgagaaacacagtgaacgttaatagtagcagtaatcgtggcgaagcgattctcgccgccctgaaaacgcagttccccggcgcggtgctggatgaagagcgacaaacgcctgaacaggtcaccattacggtgaaaatcaatctgctgcctgacgttgtacagtatctttattatcaacatgatggctggcttccggtcctgtttggcaacgacgagcggacacttaacggtcattacgcggtttattatgcccttagtatggaaggggccgaaaaatgctggattgtggtgaaggcgctggtcgatgccgacagtcgggagtttccgagtgtcacaccgcgcgtccctgccgcggtctggggcgagcgagaaattcgcgatatgtacgggctgattccggttggcctgccggatcagcgtcgcctggtgttgcccgatgactggccggaagatatgcatccgctgcgcaaagatgcgatggattatcgactgcgccctgaaccgacgactgattccgaaacgtatccgtttatcaatgagggcaacagcgatgcgcgggtgatccctgtcggcccgctgcatatcacctccgatgaaccgggtcacttccgcttgtttgtggatggcgagcaaattgtcgatgctgattaccgcctgttttatgtccatcgcggcatggagaaactggcagaaacgcggatgggctacaacgaagtgaccttcttaagcgaccgcgtgtgtgggatttgcggttttgcccacagtgtggcctataccaatagcgttgaaaatgcactggggattgaggtgccgcaacgagcacatactattcgcagcattctgctggaagtcgaacggctacacagtcatttgcttaaccttggcctctcctgccatttcgttggttttgataccggctttatgcaatttttccgcgtgcgggaaaagagcatgacgatggcggaattgctgatcgggagccgtaaaacctacggtctgaatctgattggtggtgttcgccgcgatattctcaaagagcaacgtctgcaaacgctgaaactggtgcgcgagatgcgcgccgacgtgagcgagctggtagagatgctgcttgctacgccgaatatggaacaacgcactcagggcattggcattctcgaccgacaaatcgcccgtgatttgcgctttgatcacccctacgccgactacggcaatattccaaaaacactgtttacctttaccggcggcgatgttttctcccgcgtgatggtccgtgtcaaagagacgtttgatagcctggcaatgctggaatttgccctcgacaacatgccggataccccactgctgaccgaaggctttagctataaacctcacgcattcgcgctgggctttgttgaagcgccacgcggtgaagacgtgcactggagcatgctcggtgataaccaaaaattgttccgctggcgctgccgtgccgccacctacgccaactggccggtgttgcgttacatgctgcgcggcaataccgtttctgacgcaccgctgattatcggtagccttgatccctgctactcctgtaccgaccgtgtgacgctggtagatgtgcgcaagcgccagagtaaaaccgtgccgtataaagagatcgaacgctacggcattgatcgtaaccgtagcccgctgaagtaaggacagaagatgctgaagttactgaaaactattatgcgcgccggaaccgcgacggtgaaatatcccttcgcgccactggaggtcagccctggctttcgcggaaaaccggacctgatgcccagccaatgtattgcctgcggtgcctgcgcctgtgcttgtccggcaaatgcgctggctatccagaccgacgaccagcaaaatagccgcacctggcagctctatctggggcgttgtatttactgcggacgttgtgaagaagtgtgcccgaccagagccatccagcttaccaataactttgaactgaccgtcaccaataaagccgatctctatacccgcgcgacgttccatctacaacgttgcagccgttgcgaacgcccgtttgccccgcaaaaaaccatcgcactggctgctgaattgttagcacagcaacaaagtgcgccacaaaaccgcgaaatgttgtgggcgcaagcgagcgtctgcccggaatgcaaacaacgcgcgacgctgatcaacgacgatacagatgtactgctggtggctaaggagcagctatgagtccagtgcttacacaacatgtcagccagcccatcacgctggacgagcaaacgcaaaagatgaagcggcatttgctacaggatatccgtcgcagcgcttacgtttatcgcgtcgattgcggcggctgcaacgcctgtgaaatcgaaatttttgctgccattacaccagtattcgacgcagaacgttttggcattaaggttgttagtagtccgcgtcacgccgatattttgttatttactggcgcagtcacccgggcgatgcgtatgcctgcacttcgggcgtatgagtctgcccccgatcataaaatttgtgtttcctacggcgcgtgcggtgtcggcggcggtattttccacgatctctacagcgtctggggcggtagcgacaccattgtccccattgatgtttggatccccggctgcccgccaacaccggccgccaccattcacggtttcgccgtggcgctcggtttgctgcaacagaagattcacgctgtggattatcgcgatcccaccggggtgactatgcaaccgttgtggccgcagatcccgccaagtcagcgtatcgccattgagcgagaagcgcggcggctggcgggctatcgtcaggggcgagaaatttgcgatcggctcctgcgccatttaagcgacgatcctacaggaaatcgggttaacacctggttgcgcgatgccgacgatccacgtctcaatagtatcgttcagcaactctttcgcgtactccgggggttacatgactgaagagtgcggggaaattgttttctggacgctgcgaaaaaagtttgtcgccagtagcgacgagatgccggaacacagctctcaggtaatgtattacagcctagctatcggccatcacgttggcgtgattgattgtctgaatgtcgccttccgctgcccactgacggaatacgaagattggcttgcactggtcgaagaggagcaagcccgacgtaagatgctgggggtgatgacttttggtgagattgttattgacgccagccacaccgccctgttgacccgggcattcgcgccactggcggatgacgcgacgtctgtgtggcaggcgcgtagcattcaattcattcatctgttggatgaaattgtgcaggaaccggccatctatctgatggccagaaaaattgcgtgagaaggatttctcattaataaggactgttgatggctatgagtgacgaggcgatgtttgccccgccacaaggaataacaattgaagcggtaaacggaatgctcgcggagcggttagcacagaaacacggcaaggcgtctttattacgcgccttcatcccgctgccgccgccgttcagcccggtacaacttattgaactgcatgttctcaaaagcaacttctattaccgctaccatgatgatggcagcgatgtgacggcaacaacagagtatcagggcgagatggtcgattatagccgtcacgccgtccttctcggcagtagtggaatggcggagctacgctttattcgcacccacggcagtcgttttacttcccaggattgcacactgtttaactggctggcgcggataatcaccccggttctgcaaagttggctcaatgatgaagaacagcaggtggcgctgcgtttgctggagaaagatcgcgatcatcatcgggtactggttgatattactaatgcagtgctgagtcatcttgatctcgacgatctgatcgctgacgtcgctcgtgagatccatcattttttcggtctggctagtgtcagtatggtactgggcgatcatcgaaagaacgagaagttcagcctgtggtgcagcgatctttctgccagtcattgtgcgtgtctgccacgctgtatgcctggcgaaagtgtattgctgacacaaacgctacaaacccgacaaccgaccttgacgcaccgtgcagatgatctgtttctctggcaacgcgacccgttattactcttacttgcatctaacggctgcgaatctgcgctccttataccgcttacctttggcaaccatacaccgggtgcattgttgctggcgcatacctcttccactctctttagtgaggaaaactgccagctactacaacacatagccgatcgcatcgctattgccgttggcaatgccgatgcctggcgtagcatgaccgatttgcaggaaagtttgcagcaagaaaaccaccagcttagcgagcagctccttagcaatctgggcatcggtgacattatctatcaaagccaggcaatggaagacctgctccagcaggtagatattgtggcgaagagcgacagtacggtgttgatttgtggtgaaaccggaactggcaaagaggtgatcgccagagcgatccatcaacttagcccgcgacgcgacaagccgctggtcaaaatcaactgcgctgccatccccgccagtcttctggaaagtgagttattcggtcatgacaaaggggcgtttactggtgcgattaatacccatcgtggtcgttttgaaattgccgatggcggcacgttgtttctcgatgaaattggcgatctgccgttagaacttcagcctaaactgctgcgcgtattgcaggagcgggagattgagcgtctcggcgggagtagaacgatcccggtgaatgtcagagtcattgccgccaccaaccgtgatttgtggcaaatggttgaagatcgccagtttcgcagcgatctcttttatcgcctgaatgtcttcccactggaattgccgccgctacgcgaccgtccggaagatatccctcttttagcaaaacatttcacgcaaaaaatggcgcgccatatgaatcgcgcaattgacgccatcccgaccgaggcactacgccagttgatgagctgggattggccgggcaacgtgcgcgagctggaaaacgtgattgagcgggcggtactgttgactcgtggtaacagtctgaatttacatctaaatgtccgacaaagccgtttactgccgacgctaaatgaagatagtgcgcttcgcagtagtatggcgcagttactgcacccgacgacgccagagaatgacgaagaagaacgtcagcgcattgttcaggtattgcgagaaaccaatggcattgttgccgggccccgtggcgcagcgacgcgattagggatgaagcgcaccacgctgctgagtcgaatgcagcggctggggatcagcgttcgcgaggtgttgtaatctgcttttgcaggagtatgcatgagaaacaaactctctttcgacttgcagttgagcgccagaaaagcggcaatcgctgaacggattgccgcccataaaattgcccgcagtaaagtgagcgtctttttaatggcgatgtccgctggcgtgtttatggcgatcggatttactttttacctttccgttatcgccgatgccccgtctagtcaggcattaacccatctggtgggcggcctttgctttacactcggctttattttgctggcggtttgcggcaccagcctgttcaccagcagcgtaatgacggtgatggcaaaaagtcggggcgtcattagttggcgaacttggctgattaacgcacttctggtggcctgcggtaatctggcaggtattgcctgtttcagtttgttaatctggttttccgggttggtgatgagtgaaaacgcgatgtggggagtcgcggttttacactgcgccgagggcaaaatgcatcatacatttactgaatctgtcagcctcggcattatgtgcaatctgatggtttgcctggcgctgtggatgagttattgcgggcgtagcttatgcgacaaaatcgtcgccatgattttgcccatcaccctgtttgtcgccagtggctttgagcactgtatcgccaatttgtttgtgattccgttcgccattgccattcgccatttcgcccctccccccttctggcagctggcgcacagtagcgcagacaattttccggcactgacggtcagccattttattaccgccaatctgctcccggtgatgctgggtaatattatcggcggtgcggtgctggtgagtatgtgttatcgggctatttatttacgtcaggaaccctgaaaaatcagcccggcgaaacagttcgtcgggctgaagattattcttgcgcgatttgcccatcgggccaggcatgaatcacggctttgatcagcgtcgccaacggaatggcgaagaatacgccccagaatccccacaaaccaccgaagatcaccacgcttaaaataatcaccagcggatgcaggttaaccgcttcggagaacaacaccggcactaacaggttgccgtccagcgcctgaataatcagatacaccgcgaagcagctccagaattcagtacctgcgccaaactggaatagcgccacgccaaccaccggaatggtcaccacaaatgcgccaatgtacggaataagaacgctgaagccgaccagcactgccagcagcaggctatagttcagcccgaagagcaagaaccccagccaggtggcgatccccaccacgatcatctccagcactttgccgcggatatagttggtgatttgttgattcatctccttccacacctgtcctgccagcccacggttacgcggcagcacccggcgaacggcgttcagcatctgctctttgtctttcagcaggaagaagaccatcaatggcaccagcaccagatagacggctatggtcagcaaaccgaccaggctggcgagggaaattttcaccacgctatcgcccatggtcagcatccgactgcgcatattttcggccattgcatcaataatgcccgcgtccattaacgccggatagcggcgcggcaacgtggcggcaaagtcagaaagcttattgagcatccccggcatatcgcggattaagtagatgccctgttgccaggcgataggcagtaccacgaacgccatcagtagcaatataccgacgaaaaccaccaatacaatgctcgtcgcccagcggcgggagcagccaatagattgcagacgcacggttggccattccagcaaataggccagcacaatagccaccagcaacggagcaagcaggccactaaagaaaaagataatgccaaatccggcaactaaaataaccagcaaggcaatcgcttccgggtcgctaaaacggcggcgataccattgcatcaacatttcgagcataaagaccttccctgaacctcaagagcgggattgcgatccgcaattgtatcgaaatgtcacaaaaaagacttcgctttttatgacggattcaggaaactgaaaagtcatttgagtgggctaatcttcgccgttacactcaaaggcggcgcggtgggaacgatatttcacagtatcggtcaaatgactatctccagaaatacaggatagaggttatgttcaggcagttgaaaaaaaacctggttgcaaccctcattgctgctatgaccattggtcaggtagccccggcgtttgccgacagcgcagacaccttgccggatatgggaacctccgcaggaagcacgctttccattggtcaggaaatgcagatgggcgactattatgtccgccagctacgcggcagcgcgccgttaattaatgacccgctgttaacgcaatatattaatagcctggggatgcgtctggttagccatgccaatagcgttaagacaccgtttcatttttttctgatcaacaacgacgaaattaacgcctttgctttctttggcggcaacgtggtgctgcactctgccctgttccgttattccgataacgaaagtcaactggctagtgttatggcgcacgaaatctcccacgtcacccaacgtcacctggcgcgagcgatggaagatcagcagcgcagcgcgccgctgacctgggtcggcgcgttaggttctattttactggcgatggccagtccgcaggcggggatggcggcgctgaccggtacactggcgggaacgcgtcaggggatgatcagtttcacccagcaaaatgaacaggaagcggaccgcattggtattcaggtgctgcaacgcagcggattcgatccgcaggcgatgccaaccttcctcgaaaaattactcgatcaggcgcgttactccagccgcccgccggaaattttattgactcacccgttgccggaaagtcgtctggcagatgcccgcaaccgtgctaatcagatgcgcccgatggtggtgcagagcagcgaagatttctatctggcgaaagcgcgcacactggggatgtataattccggacgtaaccagctcaccagtgatttgctggatgaatgggcgaaaggaaacgttcgtcagcaacgagcagcacaatatggtcgtgctttacaggcgatggaagccaataaatacgacgaggcgcgtaaaacgctgcaaccgttactggcggcagaacctggcaacgcatggtatctcgatctggctactgatatcgatcttgggcaaaacaaagccaatgaggcgatcaatcgtctgaaaaatgcccgcgatttacgcaccaatccggtgttgcagctcaacctggcgaacgcttatttgcaaggcggtcaaccacaagaagcggccaatattctgaatcgctacacctttaataataaagatgacagcaacggctgggatttgctggcacaggcggaagccgcgctaaataaccgcgatcaggagctggctgcgcgagcagaaggttatgcgctcgccggacgactcgatcaggccattagcctgttgagtagcgccagtagccaggtgaaattaggcagcctgcaacaagcgcgttacgatgcgcgcatcgaccagttgcgccagctgcaggaacgctttaagccttataccaagatgtaattcgcattaaaggaagaacaatgaccaaacaggtaaaaatctaccataacccacgctgtagtaagagccgggaaacgctgaacctgctgaaagaaaacggcgtggagccagaagtggtgctctaccttgagacacccgccgatgcggcaacgctgcgcgatttgctgaaaatactggggatgaatagcgcccgtgaattgatgcgccagaaagaggatctttataaagaactgaacctggctgacagtagccttagcgaagaggcgctgattcaggcaatggtggataatccgaagctgatggagcgcccgattgtggtcgcgaatggcaaagcgcggattggtcgtccaccggagcaggtactggaaatcgtgggttaagatgtgctccatcgctagttgaagcacattgccggatgcgacgcttgccacgtcttatccggcctacgaatactatggattaacttcgcgtagttcggataaggcgttcgcgccgcatccgacaataaacaccttatttacaacttcagaatttctttcacaaacggaatggtcagcttacgttgcgcggtaatgctcgcacgatccaactgatccaacgtcataaatagcgtgcgcatttctctgtcgagccgcttcagcaagaaacgccccacatcttccggcagttcaaaaccacgcaaacgcgcgcgtaactgtagcgcctgcaacttatcttcatcagaaagtggctgcaatttgtagatctgcccccagtcgagtcggctcgcgagatccggtaatcccagattcaactgccgcggtggacgatcgccggtgatcaacaaccgtgttttgccgctttccagaattcgattgtagagatcgaaaatcgccatctcccacaactcatcgcctgcaatacactcaatgttgtcgatacagaccaggctcaaatgctccataccgtcgagcacttccggaacaaaccaggtgcgtttatccagcgggacatagcccaccgcatcgccacgctggctcaattccgcgcaagccgcgtgcagcagatggctgcgccccgcgccttcgcgtgcccagagatagatgtaaccgctatgttcctgacgcagcacgttttgcagcgcggccagtaaagaggagttatcccccggccagaaacttgcaaaggtttcgtcgtcaggaagataaagtggcaaagagagctgtgccggtgtgttcagagatacctcaaccaggatttcacaaaatcggctgaagtttaccacagaatcccatgatgtttgaaccgggcagcaacactgcccggtcggtacattatttgtctgttatatccgcgtcttctgcgtccagcaccacttcttcagggcgcagcacactgatcagtttgaagatcaaacttaagccgataccgacgatggtcgccagcgccataccttttaactccgccgcgccgatgtttaccttcgcgccactgacgccgatgatcaaaatcacggaagtcaggatcaggttctgtgctttgttgtaatccactttgctttcgatcaaaacacgaataccggaagcaccgatgacaccataaagcagcaggctaacgccgcccatcaccggcaatgggatcatctggatagcggcagccagtttaccgacgcaggaaagcaggatagcgaaaatcgccgccccgccgataacccaggtactgtaaacacgggtgatcgccatcacgccaatgttttctccgtaagtagtatttggcgtagagccaaagaagccggaaatcacggtgctcaagccattagcaaacatgctacggtgcagacctggatcgcgcagcagatcttttttgacgatattagccgttactaccaggtgccctacgtgttcggcaataaccactaacgccgctggcagaatagtcagaatggcaaaccactcgaagcgcggcgtatagagggttggcagcgcaaaccagtgagcattaataatcggcgtggtatcgacaattcccattgcgaaagagagcgcgtaccccaccagcacgccaattaaaatcgggataattgccaggaaaccacgaaacagcacggaacctaaaaccgtgaccgccagggtggtaatagagatgatgatggttttggagtctggcgtttgcccttcagccgggagtaaacccgccataccggcagctacgcccgccagctccagaccgatgacggcaacgattgcgcccattgccgcaggtggaaacagcacgtccagccagccggtccccgctttcttcacgataaaagaaaccaggcagaacagcacgccgcacataataaagccgcccagcgcgacttcataccctaacggcaacagtaacaataccggactaataaaggcaaagctggaaccaagataagccggaattttccctttacagatgaagagatacagcagcgttccaataccgttaaataacagtacagtcgccgggttaatatgaaataagacgggcaccaggacggttgcaccaaacatggcgaacaaatgttgcaaactaagcgggattgtctgtaaaagtggcggtctttcactcaccccgatagcacggcgcgtcatagtattatcctctgtattatgtgttataggcgctttactcaaaaaaaagccgactcttaaagtcggctttaattatttttattctttatttcgtaccaaagattttgtcaccggcatcgccgaggcccggaataatgtatccgtgctcgttcagtccctgatcaatgcttgcggtatacagttcgacgtccgggtgcgctttttccagcgcagcgataccttctggcgcagctaccagcaccagaactttgatgctgctgcagcccgcttttttcagcaggtcgatggtcgcgataacggaaccaccggttgccagcattgggtcaacgatcagcgccatacgctcatcgatgttagaaaccagtttctggaagtacggtaccggctccagcgtttcttcattacggtacataccgacaacgctgatgcgcgcgctcggaacgttttccagcacaccgtccatcataccaagacccgcacgcagaattggcacaacggtaattttcttacctttgatctggtcgatttctaccgggccgttccagccttcgatagttactttttccgtttcgaggtcggcggtcgcttcgtaagtcagcaggctacccacttcggaagcgagttcgcgaaagcgcttggtgctgatatcttgctcacgcatcagtcccagcttgtgtttgacgagtgggtgtttgacttccacgatcttcatactctttctcctttgaggggcagccacaaaaaaaatcgacggattatacctcctttcttcaaggcggcaatattcttttcgttgactttagtcaaaatgataacggtttgagataaagttattttatattcagatggttatgaaagaagattattccatccgaaaactaacctttaccctggcacaagtcttctttcgccgcgcgcctggggaaaagacgtgcaaaaaggttgtgtaaagcagtctcgcaaacgtttgctttccctgttagaattgcgccgaattttatttttctaccgcaagtaacgcgtggggacccaagcagtgaccgataaaacctctcttagctacaaagatgccggtgttgatattgacgcgggtaatgctctggttggaagaatcaaaggcgtagtgaagaaaacgcgtcgtccggaagtgatgggcggtctgggcggcttcggtgcgctgtgtgcattgccgcaaaaatatcgtgaacccgtgctggtttctggcactgacggcgtaggtaccaagctgcgtctggcaatggacttaaaacgtcacgacaccattggtattgatctggtcgccatgtgcgttaatgacctggtggtgcaaggtgcagagccgctgtttttcctcgactattacgcaaccggaaaactggatgttgataccgctagtgcggtgatcagcggcattgcggaaggttgtctgcaaagtggctgtagtctggtgggtggcgaaacggcagaaatgccggggatgtatcacggtgaggattacgatgtcgcgggtttctgcgttggcgtggtagaaaaaagtgaaatcatcgacggctctaaagtcagcgacggcgatgtgctgattgcactcggttccagcggtccacacagcaacggctatagcctggtgcgcaaaattcttgaagtcagcggttgtgatccgcaaaccaccgaacttgatggtaagccattagccgatcatctgctggcaccgacccgcatttacgtgaagagtgtgctggagttgattgaaaaggtcgatgtgcatgccattgcgcacctgaccggcggcggcttctgggaaaacattccgcgcgtattgccagataatactcaggcagtgattgatgaatcttcctggcagtggccggaagtgttcaactggctgcaaacggcaggtaacgttgagcaccatgaaatgtatcgcaccttcaactgcggcgtcgggatgattattgccctgcctgctccggaagtggacaaagccctcgccctgctcaatgccaacggtgaaaacgcgtggaaaatcggtatcatcaaagcctctgattccgaacaacgcgtggttatcgaataatgaatattgtggtgcttatttccggcaacggaagtaatttacaggcaattattgacgcctgtaaaaccaacaaaattaaaggcaccgtacgggcagttttcagcaataaggccgacgcgttcggccttgaacgcgcccgccaggcgggtattgcaacgcatacgctcatcgccagcgcgtttgacagtcgtgaagcctatgaccgggagttgattcatgaaatcgacatgtacgcacccgatgtggtcgtgctggctggttttatgcgcattctcagcccggcgtttgtctcccactatgccgggcgtttgctgaacattcacccttctctgctgccgaaatatcccggattacacacccatcgtcaggcgctggaaaatggcgatgaagagcacggtacaagcgtgcatttcgtcaccgatgaactggacggtggcccggttattttacaggcgaaagtcccggtatttgctggtgatagcgaagatgacatcaccgcccgcgtgcaaacccaggaacacgccatttatccactggtgattagctggtttgccgatggtcgtctgaaaatgcacgaaaacgccgcgtggctggatggtcaacgtctgccgccgcagggctacgctgccgacgagtaatacccccgtaattaaagcgccagctctgccgctggcgtttttcaattcacctgtaaatcgcaagctccagcagtttttttcccccttttctggcatagttggacatctgccaatattgctcgccataatatccaggcagtgtcccgtgaataaaacggagtaaaagtggtaatgggtcaggaaaagctatacatcgaaaaagagctcagttggttaagcttcaatgaacgcgtgcttcaggaagcggcggacaaatctaacccgctgattgaaaggatgcgtttcctggggatctattccaataaccttgatgagttctataaagtccgcttcgctgaactgaagcgacgcatcattattagcgaagaacaaggctccaactctcattcccgccatttactgggcaaaattcagtcccgggtgctgaaagccgatcaggaattcgacggcctctacaacgagctattgctggagatggcgcgcaaccagatcttcctgattaatgaacgccagctctccgtcaatcaacaaaactggctgcgtcattattttaagcagtatctgcgtcagcacattacgccgattttaatcaatcctgacactgacttagtgcagttcctgaaagatgattacacctatctggcggtggaaattatccgtggcgataccatccgttacgcgctgctggagatcccaagtgataaagtgccgcgctttgtgaatttaccgccagaagcgccgcgtcgacgcaagccgatgattcttctggataacattctgcgttactgccttgatgatattttcaaaggcttctttgattatgacgcgctgaatgcctatagtatgaagatgacccgcgatgccgaatacgatttagtgcatgagatggaagccagcctgatggagttgatgtcttccagtctcaagcagcgtttaactgctgagccggtgcgttttgtttatcagcgcgatatgcccaatgcgctggttgaagtgttacgcgaaaaactgactatttcccgctacgactccatcgtccccggcggtcgttatcataattttaaagactttattaatttccccaatgtcggcaaagccaatctggtgaacaaaccactgccgcgtttacgccatatttggtttgataaagcccagttccgcaatggttttgatgccattcgcgaacgcgatgtgttgctctattatccttatcacacctttgagcatgtgctggaactgctgcgtcaggctagcttcgacccgagcgtactggcgattaaaattaacatttaccgcgtggcgaaagatagtcgcatcatcgacagcatgatccacgccgcacataacggtaagaaagtcaccgtggtggttgagttacaggcgcgtttcgacgaagaagccaacattcactgggcgaagcgcctgaccgaagcaggcgtgcacgttatcttctctgcgccggggctgaaaattcacgccaaactgttcctgattagtcgtaaagaaaacggtgaagtggtgcgttatgcacacatcgggaccgggaactttaacgaaaaaaccgcgcgtctttatactgactatagcttgctgaccgccgatgcgcgcatcaccaacgaagtacggcgggtatttaactttattgaaaacccataccgtccggtgacatttgattatttaatggtaagcccgcaaaactcccgccgcctattgtatgaaatggtggaccgcgagatcgccaacgcgcagcaagggctgcccagtggtatcaccctgaagctaaataaccttgtcgataaaggcctggttgatcgtctgtatgcggcctccagctccggcgtaccggttaatctgctggttcgcggaatgtgtagcctgatccccaatctggaaggcattagcgacaacattcgtgccatcagtattgttgaccgttaccttgaacatgaccgggtttatatttttgaaaatggcggcgataaaaaggtctacctttcttccgccgactggatgacgcgcaatattgattatcgtattgaagtggcgacgccgctgctcgatccgcgcctgaagcagcgggtactggacatcatcgacatattgttcagcgatacggtcaaagcacgttatatcgataaagaactcagtaatcgctacgttccccgcggcaatcgccgcaaagtacgggcgcagttggcgatttatgactacatcaaaagtctcgaacaacctgaataaccctatgccaatacacgataaatcccctcgtccgcaggagtttgctgcggtcgatcttggtagtaacagttttcacatggtcatagcccgtgtggtagatggtgccatgcagattattggccgcctgaaacagcgggtgcatctggcggacggcctggggccagataatatgttgagtgaagaggcaatgacgcgcggtttaaactgtctgagcctgtttgccgaacggctacaagggttttctcctgccagcgtctgtatagttggtacccatacgctgcgtcaggcgctgaacgccactgactttctgaaacgcgcggaaaaggtcattccctacccgattgaaattatttccggtaatgaagaagcccgtctgatttttatgggcgtggaacatacccaaccggaaaaaggtcgcaaactggttattgatattggcggcggatctacggaactggtgattggtgaaaatttcgaacctattctcgttgaaagccgccggatgggttgtgtcagctttgcccagctttattttcctggcggggtcatcaataaagagaattttcagcgcgctcgcatggcggcagcacaaaaactggaaactttaacctggcaattccgtattcagggctggaacgttgcaatgggcgcttccggtaccataaaagccgcccatgaagtgttaatggaaatgggcgagaaagacgggataattaccccggaacgtctggaaaaactggtaaaagaagttttacgtcaccgtaatttcgcaagcctgagtttaccgggtctttccgaagagcggaaaacagtcttcgttccgggactggcgattttatgcggtgtgtttgatgctttagccatccgtgaactgcgcctttctgacggggcgttacgcgaaggcgtactgtatgaaatggaaggacgtttccgtcatcaggatgtgcgtagtcgcaccgccagcagcctcgccaaccagtatcacatcgacagcgaacaggcccgacgggtgctggataccactatgcaaatgtacgaacagtggcgggaacagcaaccgaagctggcgcatccgcaactggaggcgctactgcgatgggccgccatgctgcatgaggtcgggttgaatatcaaccacagcggtttgcatcgccactccgcttatattctgcaaaacagtgacttgccgggttttaatcaggaacagcagctgatgatggcgacactggtgcgctatcaccgtaaagcgattaagctcgacgatctaccgcgctttaccttgtttaagaagaaacagttcctgccactgatacagctattgcgccttggcgtattactcaacaatcaacgtcaggcaaccaccacaccgccaacattgacgctgattactgatgacagtcactggacactgcgtttcccgcatgactggtttagtcagaatgcgctggtactgcttgatctggaaaaggagcaagaatactgggaaggcgtggctggctggcggttgaaaattgaagaagaaagtacaccagaaatcgccgcttaatactttgcgggccgacgagaaatgtcggcccgcattattcaggcactttcgcgaatgggttcgatttcattcagcgtatcaattaacggctgcggcttaccaataagataaccctgcatataatcgatccccaaagagagcaccgcctcgcggatctcttcgttttcaacgtactctgccactaccagcattttcttcattcgcgccaggtggcaaatgcttgccactatctgataatccagactattactcacaatattgcggataaaactgccgtcaattttaagcagatcggcattcacatttttaagccgcgcatagctggcgtagccggtgccgaaatcatcaatcgcaatctggcagcctaattcctgaagatgctgcaaggtgatttgcgcctgcttaacattggtcagagcattactttcggtgacttcaaaaataagttgccacgcttcaatctgatatttagccagcaactgactgacttcaacaggaaaacgagcctgacatacgctggttggagacagattaatagcaaaacggtgagcgggcatcttcgctctgttttcagccataaattgcagcgtatgctcaatgacccacatgtcgatactgctgcttaaaccaaattcgtgcgcgaccggcaagaagctatcggggctgatcagttcatcattctcacctttcatgcgcagaagaatttcatggtaaacatcaccacgcataccggtaatcggctgggccatcaggaaaaaatggttgtgttccagcgcctgctgtagtcgattcatcatcgcgactttatctttcaattcgcgttgcaaatacattgccccgcgacgctgcatattttccggggcgttggtcacgatggaaagttcggcgaccgtatttagctctcccagcagcaggtagatatgattcactgggctgcgcacatagcagtaactgacgccaatctgcggttgcatcggcatgccatcccaaaagaaacgaaattgcttgagatggctatccagtgcggtaatgcgctcctggtggctttctgtattcagtcgcagcgcgagatcgttaccgctaagctgataaacatcttcacccggttccagcaagggactcagccagtgagaaagtttttgcttgtattgaatccgcagcatgatgccatagttcttaaccagcatttccatgccagggatgcgtaaataacaaagcgcagaccagggggcatcacgcaacgcgcgattcagggcgcgaacatttggcagatgaaccaccgggtccacatacgcaagccgctgaatgcgtctgactaccgctctctgacgggttgccagtacagccatataattgacaataaaagagaataccagataactggaggaggttatggtcagctgcgtggtatagccaggataaatgggaatgtaattttgatagctgtggatgctgatcatcaacacgaccgcccagagcaggctaatcagcttataaccatagcgcatcgctccccacatcatcaggggcagcaataaactcaaggtataattggtgctaaaaattgtgcttttttcatttaacggcatgcataacagcaacaataaagcacctaatgccagtagccagagcgcgaactcttttttggtgactttggcatcaacctgctgttttaattggctataatagctacgtaaataaaatggatttcgcactacccgaatgatgaagtagcacagcgggacaccgatcagattacccaccagtaaggcctgataattgattaaagtcccgaggttaaaaggcatgacaccgaccagattttctctgctcgccagtaatcctacaaatgcagcaaactggaaaagtatcagaaacagcgttgcaggaaacacaatctgccagaatatacgctgggaaattaaacgggtatcaccatgactaacgttgttacgccggggagtaaagaccctgtaaccgccccaacagagaatgataatgataataaaattagccgttaaacttagcgtttcgtaaaaacccagctctgcatatttgcggacaaaaatccctaaggcgatccctggcaatgccgcccagctgaaaaacatcatcatgctgatcatcagtgccagaggcagataaaagagaaaaacctcaccggaagaaatatgcgcgaaagtattaatgtgggcgaaaatgggcaagattaaagaaggcaggaacagcggaagcccccaccatttatcacgtatttttatataagttgcattcagtttcatagatgctcagcagaatcccccacatcctgaaggaggtgtattcagacaggcatcccacctgacttcgaatgatgattattcatcactatagagagcattgattctaagtgtcatatgaaagtaccaattgatatatatcaaacaaaataaccctgattaatgaattattacgtttatcatgttaattcatcattattacatcatcattgtaaataattaaattaacttccataacattaaaatatgtatccactgacgcttttttacataacgaagaattgaccattttgtcctgttgtgccttaatgtaagtaccgtccacagcgtgggacatacttcaaggaaccttttgtgagtcaggcaaccagtatgcgaaaacgacaccgatttaacagtcgcatgacccgtatcgtactgctcatcagctttatcttcttctttggccgttttatctacagctccgtcggtgcctggcagcaccatcagagcaaaaaagaagctcagcaatccacactctccgtcgaaagtccggtacaacgttaacggttaccttctccactttcacagaacataacggcacttcgctgtcggatgcttttgctgtttgggattatcaaagcggcagatattctttcatcttaaattttacgtctttatcctgactgatgtttatcctgtttggctgcgaaataaatataaaattaatatatatgttgtaatgatatatttttataaattattccctgcgtgaattttaataaatttaatctatccctttatacgcaatacatttactttcctcttttgatgatcttaaatgtcttatttttcgtaatgtgtataacaaggaatagtgatgaaatttaaaaaatgtcttctgcctgtggcaatgttagcgagtttcactctggcaggatgccagagtaatgctgacgatcatgctgccgatgtttatcaaaccgatcaactgaataccaaacaagaaactaaaaccgttaatattatttccattcttcccgcaaaagttgccgtagacaactcccaaaataaacggaacgcacaagccttcggcgcgcttattggcgcagtcgctggcggtgttatcggccacaacgtcgggtctggcagcaattccggaacgacggcaggtgcagttggcggcggagctgtaggcgcggcagcgggttctatggtgaatgataaaaccttagtggaaggtgtttctttaacctataaggaaggcaccaaagtgtatacctctacccaggtgggtaaagagtgccagtttacgacaggtttagccgttgttattaccacgacgtataacgaaacgcgtattcagccaaataccaaatgtcctgaaaagagctaataatcaggaggagtcatgaagaaagtttttctttgcgccatcttagcctccttaagctatccggctatcgccagtagtttgcaggatcaactctctgctgtcgcagaagcggaacagcaaggtaaaaatgaagagcaaaggcagcatgacgaatgggtcgcggagcgcaacagggaaatccagcaagagaagcaacgtcgcgcaaatgcccaggccgccgctaacaaaagagcggcaacggcagcggcaaataagaaagctcgtcaggataaactggacgccgaagcctctgcggacaaaaaacgcgatcaaagttatgaagatgagctacgcagcttagagattcagaaacaaaaactggcgctggcgaaagaagaagcccgcgttaagcgagaaaacgaatttatcgatcaggaactgaagcacaaagctgcgcaaaccgatgtggtgcaatctgaagctgacgccaacagaaatatgactgaaggcggtcgcgatctgatgaaaagcgtgggcaaagcagaagagaacaaaagcgacagctggtttaattaatcgatgttagtaacttcaatcctataattcttgaagataaaaaaccctctgtagtaacagagggttttgttcattcatagtgcagggtcaaatcattcccactcaatggtagctggcggcttgccgctgatgtcatacaccacgcgggaaataccgttcacttcattgataatgcggttggaaacgcgaccgaggaaatcgtacggcagatgcgcccagtgtgcggtcataaagtcgatggtttcgacagcacgcagagagacaacccagtcatacttacgaccatcgcccattacgccaacggaacgtaccggcaggaacacagtgaacgcctggctgactttgtcgtacaggtccgctttacgcagttcttcaatgaagatggcgtcagcacggcgcagcaggtcacagtactctttcttcacttcacccagaacacgaacgccaaggcctggtcccgggaacgggtgacggtacagcatgtcgtacggcaggcccagctccagaccaatcttacgcacttcgtctttgaacagctctttcagcggttcaaccaggcccatcttcatctctttcggcaggccgcccacgttgtggtgagatttgatgacgtgtgctttaccggttgcagacgccgcagattcgataacgtcagggtagatggtgccctgcgccagccacttcacgtcttccagtttcagcgcttcttcatcgaatacttcaacgaaaacgcgaccgatgattttacgttttgcttccggatcgttttcgccagccagcgcactcaggaagcgatcttctgccggtacgtgaacaatgttaagaccaaagtgatcgccaaacatatccagaacctgctctgcttcgttgaggcgcagcaggccgttgtcgacgaatacgcaagtcaggtttttaccgatagcgcggtgcagcagcattgcggttacggaggaatccacaccaccagagaggccgaggatgactttatcgtcgcctacctgctcgcggatgcgagctacagcatcgtcgataattttcgctggcgtccacagggcttcacactggcagatatcacgcacaaaacgctccagcatgcgcataccctggcgggtatgagtcacttccgggtggaactgtacgccatagaagcgtttttcttcgttagccataatggcaaacgggcagctttcggtgctggctacggtgatgaagtcggacggaatagcggtaactttatcgccgtggctcatccagacatcgagcagcggtttaccgtctgcggtcagcgcatcttcgataccgcgaaccagtgcgctgtcgtttacgacttcaacctgcgcgtagccaaattcacgttcgttagaggcttcaacgtgaccgcccaactgcattgccatggtctgcatgccatagcaaacgccgaataccggtacgcctgcttcaaagacatactgcggcgcacgcggactgttttcttcagtagtactttccgggccgccggaaagaataatgccgcttggattgaagtcacgaatttgtgcttctgtcacatcccacgcccacagttcgcagtaaacacccagctcacgcacgcggcgcgcaaccagttgagtgtactgagaaccgaagtccagaatgaggatgcgatgcttatgaatgttttccgtcattgacgcttattccgaggcaagtgaaacagataatataaatcgcccgacatgaagtcgggcgaagagaatcaggagcccagacggtagttcggggactctttagtaatggtcacgtcgtgaacgtggctttcctgaatgcccgcaccgctgatacgtacaaactccgctttagtacgcagttcgtcgatagtaccacagccggtcagacccatacaggagcgcaggccgcccatctgctggtgaatgatctctttcaggcgacctttataggctacgcgaccttcgataccttccggcaccagtttgtcggcagcgttatcgctctggaaataacggtcagaggaacctttggacatcgcgcccagggaacccataccacggtaagatttgtaagaacggccctggtagagttcgatttcacccggagattcttcagtacccgccagcatggaacctaccatcaccgcgcttgcgccagcggcgatagctttggcgatgtcgccggagaagcgaataccgccatcagcgataaccggaataccggtgccttccagggcttctactgcgtcagcaacagcggtaatctgcggaacaccgacgccagtcacgatacgagttgtacagatagagccagggccaatgccgactttaaccgcactgcaaccagcttctgccagagcgcgtgcacctgcagctgttgccacgttgccgccgataatttgcagatccggatatttagcacgggtttcacggatacgttgcagtacaccttcactgtgaccgtgggaggagtcgatcagcagaacgtcaacgcctgcggcaaccagcgcgtcaacacgctcttcgttacccgcacctgcgccaaccgctgcaccaacacgcagacggccttgctcgtctttacaggcgttcggtttacgttccgctttctggaagtctttcacggtgatcatgccgatcaggtggaattcgtcatcaaccaccagcgctttttcaacgcgtttttcgtgcatttttgccagcaccacttcacgggcttcaccttcacgcacggtgaccagacgctctttcggcgtcatgtaaacgctaaccggctggttcaggtcggtaacaaaacgcacgtcacgaccggtgataatacccaccagttcgttttcttcggtaacgaccggatagcccgcaaaaccgttacgctcggtcagttctttcacttcgcgcagcgtcgtggttggcagaacagtctgcggatcagtcaccacaccagattcgtgttttttcacacggcgaacttcttctgcctggcgttcaatggacatgtttttgtggataaagccgataccgccttcctgagccagagcaatagccaggcgcgcttccgttacggtatccattgctgcggaaagcatagggatattcagacgaatagttttcgtcagctgggtgctgaggtcagcagtattcggcagaacggtagagtgagcaggaacgaggagaacgtcgtcaaacgtcagagcttctttagcgatacgtagcatgggcaatatctcgaccagagtggttaataaatattgccgcggcattatacagagcgtaaccgattgcatctacccctttttgcaaaaaatgcttgctatccccgaagggcgggttactatcgactgaataacctgctgatttagaatttgatctcgctcacatgttaccttctcaatcccctgcaatttttaccgttagtcgcctgaatcaaacggttcgtctgctgcttgagcatgagatgggacaggtttggatcagcggcgaaatttctaatttcacgcaaccagcttccggtcactggtactttacactcaaagacgacaccgcccaggtacgctgcgcgatgttccgcaacagcaaccgccgggtgaccttccgcccacagcatgggcaacaagttttagttcgcgccaatattacgctctacgagccgcgcggcgactaccagataatcgttgagagtatgcagccggccggtgaagggctgctgcaacagaagtacgaacagctcaaagcgaagttgcaggctgaaggtttgttcgatcagcaatacaaaaaaccacttccctcccctgcgcattgcgttggtgtgatcaccagtaaaaccggtgctgcgctacatgatattttgcatgtgttaaaacgtcgcgatccttctctgccggtgatcatctaccctgccgccgttcagggcgatgacgcgccggggcaaattgttcgcgccattgaactggcgaatcagcgcaatgagtgcgacgtattgatcgtcgggcgcggcggcggtagcctggaagatttatggagttttaacgacgaacgcgtagcgcgggcgatttttaccagccgcattccggttgtcagcgccgtcgggcatgagacggatgtgaccattgccgattttgttgccgatctgcgtgcgccaacgccgtctgccgccgctgaagtagtgagccgtaatcagcaagagttactgcgccaggtgcaaagcacccgtcaacggctggagatggcgatggattattatctcgccaaccgcacacgtcgctttacgcaaattcatcaccgattacagcaacagcatccgcagctccggctggcacgccagcaaaccatgcttgagcgcctgcaaaagcgaatgagctttgcgctggaaaatcaacttaagcgtaccgggcaacagcagcagcggttaacacagcggctgaatcagcaaaatccacagccgaagattcatcgcgcgcaaacgcgcattcagcaactggaatatcgtttagcagaaaccctgcgcgcacagcttagcgccacgcgtgaacgtttcggtaatgcagtaacgcacctcgaagccgtaagcccactgagtacgctggcgcgtggatacagcgttactactgctactgacggcaatgtactgaaaaaagtgaagcaagttaaagcgggtgaaatgctaaccacacgtctggaagacggctggatagaaagtgaagtaaaaaacatccagccagtaaaaaaaagccgtaaaaaggtgcattaagccagcacgaattcaacgcgttttttgcttatcaagccatgcccgtgctgacagaagtaatctactgcaccacaggcttttaacacctgcaacggttgatggcagtctggacaaagagctttcatttcaataaattccccgcaggatcggcaacgcgcatggccgttatcctgatcaagcacatgctgacattgtggacaatgcagttccatatgaattcctccggtagccattccctctacattcatagagggaatggcagataaaatacttacggataattatttatttttcttgatgtgcttcatcagacgcttacgtttacgcatctgggttggcgtcagggtgttacgcttattcgcatacgggttttccccttctttgaactgaatacgaatcgggcttcccattacgtccaggcttttgcggaagtagttcatcaagtagcgcttgtaggaatcaggcaggtctttcacctgattaccgtgaatcaccacaatcggcgggttataaccaccggcgtgggcatatttcagcttcacacgacgaccgcgtaccagcggcggttggtgatcttcaacagccatcgtcatgatgcgcgtcagcatagaggtccccacacgacgggtggagctgtcatacgcttcacgtacactttcaaacaagttaccaacaccactgccgtgcaaggcagagataaagtgcacacgagcaaaatcgataaagcccagacggaagtccagcgtttctttcacctgctctttcacttcctgactcaggccatcccacttattcaccacaatgacaagactgcgcccactattgagaataaagcccagcaggctgagatcctgatcggaaataccttcgcgcgcatcaatcactaacatcaccacgttggcgtcttcaatggcctgcaacgttttgattacggagaatttctctacagcatcggtgattttgccgcgtttacgtacgccagcggtgtcaatgagcacatactcacgtccatcgcgttccattgggatgtagatgctgtcacgcgtcgtgccaggcatgtcgtaaacaacaacgcgctcttcaccaagaatacggttagtgagtgtagacttacctacgttcggacgacccacaatcgccagtttgatcggcagactttgcgggtcgaagtcgtcttcctcttcttcttcgccgttctcttccgcttcaaattgcgcccagtattcagcgtcttcgtcgacttcctcttgcggtgcgagatcttccatccacggcagcagcacatgctccagcagacttaatacgccacgaccgtgagacgcggcgatcgggtagatttcacctaaaccaaggctgtagaaatcaaccactgcctgatcgggatccagaccgtcagttttgtttgccaccaggaaggtcggtttttcacgggagcgcagatgtttggcaatcgcttcatctgccggcatcaggcccgcgcgcgcatccaccataaacagtacgacgtccgcttcttcaatcgccagcaggctttgttccgccatgcgggtttctacaccgtcttctgtgccatcaatcccgccggtatcaatacagataaactcacggccttcaatttccgcacgaccgtacttacggtcacgagtcagacccgggaaatccgcaaccagcgcatctcgggtgcgagttagacggttaaataacgtggattttcctacgttagggcgcccgacaagcgcgaccacaggtaccatgtttaaagcctcatttttataaatcatcagacaacgcacgctatattcgcgtcgttgttaaaaacaggaaaacggcccctgtccaggagccgttttcaaagtgaacgacagagacgattaacgtgtaatagagtacacggttccgtcttttgcctggatcagcagtttgccgtcagcggcaaccggttcagtctggaaaccggaactatcaactttttgctgggcaacgaaacgaccatcttcgacgttaatccagtgcagataaccttcactgtcaccgaccaccaggttgccattatacagcaccggagaagtcagcaggcgatgcagcagatcgctttgtgtccacagcgtaacgccgccatcaatggtcaacgccatcacccggtcattttgatcgaccagatagatgcgattgccgtcgacgatgaaatcattcacgctacccagttcgcgtttccacataatctgaccactgcgcagatcaagcgccgtcaggttaccattataggccagcgcgaaaacaacgccgttaacaacgacgggagtcgtgtcaacatcgctcagacggtcaatttcggtagaaccggtcgcctgggaaatacgctgctgccaaatcatctggccctgttccatcagcactgcgctgacgcgaccattatcgccccccacgacggccgcaccaaaagccgttgtcggcgcagactcgccacgcaaagagaggctaggcatatcgaggttaactgtccatttgacagcgccgtcagcttcgttcagcgcttgtaactgaccgttactggtgtggattaacaccagaccgtcgctgaccaccgggcggctaagtgcttcacccgcgactttagtttgccatgccacagtaccatcgctggtattcagcgcgtaaacctgcgccttttcgctgccaatgtagacatgcccaccagacacggtcacaccgccagaaagtaatgcaggctctttagagaaccagccatctttctcggccaggctgacagaccagatttctttgccatcatccgcattcagcgcttttactaaaccagcgcggtccgctgcatagacaacgttgtccgccagtgccggatgaagattggaatagaagttgccaatgccgctaccaacggaagtgctccacgccgtggtcggcgtaaactggttttcaacggttggcaatggggacatctttaccacatcttcttcgctgttaaacaggctacagccgcttaaaagggtaacggaaagcagtcctggcagcagtaatttacgcaattgcatcgggtccctctcagatggacaaattattaattttcatctgcatcatttcgctcagtgccggagtaacatcgcttttcacgcctgcttcccatgcactacgcgcaccttgcttatcacctttgctcagcaatgcttcaccacgcaggtcggcaacaatggcagcccacccttcacctttgatggtatcaagggttttcagcgcggcatcagcctgcttgagctgtacctgaacgcgagcaagacgcagatttatcacggctttgagattttcatcgctcgtgtctgccagcccctgttgtaactgggcggcagctttctctagttcatttttgtcaacaaattgctgcgcaagttccaaagaagccagcgcaccataagtatttttattttcagcagcaaatttttccgccgccgggatgctatccggtttgccttcgctcactgcggtaaccgcattttgataggcaagagaagcggagcgtgcagaatcaacctgatggctgttccagtagcgccagccaatcagtgcgccaacgcccaaaatcaccccaacagccagtgctttgccattttcagcaaaaaagcgtttaaccgcttctacctggtcgttttcgttctcgtaaatttccacgctgtccttctccttccttaacccagtaacgtgcgcaaatgcgcggctacgctatcctgcgcaactgccgtttgctcaccagagcgcaaatccttcactactgctgtgccgttagccacttcagactcacccagcaccacagcaacgcgggcaccccatttatcagcacgggcaaactgtttcttaaagttgccgccgccgtggttggtcatcaatttcacgcccggtaattcatcacgcagacgctcagctaatgccatagccgcagattgtgtatcagcaccactagccaccaggtatatatcgacaacaggatcggctttaaattccggattaacggcctgtactaacaatacaagacgttcgaggcccatagcaaaaccgacagccggtgttgcacgaccgcccagttgttccacaagaccgtcataacgaccgcctgcacacacggtgccctgggagccgagactgttagtcacccactcgaaaacggtacggttgtagtaatccagaccacgcaccagacgctggtttacggtgtaagcgatccccgcgctctccagcagtttgcacagaccggcaaaatgctcacgagattcctcgtccagatagtcacctaatgccggagcgtcgttgagaagcgcctgcacttccggatttttactatccagcacgcgcagcgggttagtgtacatgcggcgtttgcagtcttcgtccagcttttctttatgctgctcaaggaatgccaccagcgcatcgcggtaattggcgcgtgcttccaggctaccgatagagttcagctcaagagttacgtgctcggaaatacccagcgcgcgccaccagcgggcagtgagcataatcagttcagcgtcgatatccggaccttgcagaccgaaaacttcgcagcccaactgatggaactgacgataacgccctttctgcggacgctcgtgacggaacatcggcccgatataccacagacgctgttcctgattgtacagaagaccatgctcgatgccggcgcgtacacagcccgccgtcccttcagggcgcagagtcaggctgtcgccattgcgatcctcaaaggtgtacatctctttttcaaccacgtcggtgacttcaccaatcgcacgtttgaatagcggggtctgctctacaatcggcaagcggatttcactgtaaccgtagctgccgagcacgtttttcagtgtgccttcaatgcgctgccagatggccgtttcgccaggcaggtaatcgttcatgccgcgaatggcttgaatgttttttgccacgtttattctctttctgaatataaaaatgaaccctcaacgcttccctcaatgtttcgggagccatgcgggttcaatcatacacgggaagcgaggcgcttcccatcacgttattatttttcaacctgctgaacgtcaattcgacgcgcttcgtccagctgactggctttcgcacgaatgcgtgcttccagctggtcgatcatatcgttgttgtccagacggtctttgcgcacgccatcttcatagaggccgcttttcttgttgccgccggtgacgccgagtgtagaaaccagcgcctcacctgggccattcaccacgcagccgataatgctaacgtccatcggagtgatgatatcttccaggcgttgctccagcgcgttaaccgtaccgataacatcaaattcctgacggctacaggtcgggcaggcgatgaagttgatccctcggctacggatacgcaggcttttcaaaatatcgaaaccgactttgatctcttcgaccggatcggccgccaggcttacgcgcagcgtgtcgccgatgccttcagacagcagcagacctaaaccaatggcggattttactgccccgctgcgcgcaccaccggcttcggtgatccccagatgcaacggctgatcgatctgttttgccagcaaacgataagactcaacagcgaggaagacgtcagacgctttcacgctgactttgaactgatcgaagttcaggcgatcgagatgatcaacatgacgcatggcagattccagcaacgcctgcggcgtcggttcgccatacttttcttgcagatctttttccaggcttccggcgttaacgccaatacggatcggaatgtttttatcgcgcgcacagtcaaccaccatgcgaatacgctcttcattaccgatattgccagggttaatacgcagacaatcgacgccgtattccgctactttcagcgcaatgcgatagtcgaagtggatgtcagccaccagcggcacgttaacctgctgtttgatgagtttgaacgcttctgccgcgtccatcgtcggtacggatacacggacgatatcagcgccaacgcgttccagcgccttgatttgattgaccgttgcttcgacgtctgtcgtacgcgtattggtcatggactgtacggcgatgggagcaccatcgccaatcggcacattcccaacgtaaatacgtgtactttttctacgttgaattggagcctggttatgcatgaaaaatctcccgcgttacccgtctgttactgcgccggactttgttcggcattgagggtcagacgcgcaacctggttagttctgataaaacgactcagatcgacaggtttcccttgatactggatctgtactgcggctggcgcaccaattttcagtttgtacggtgcctggccggttaagttcaaattaccgtctttacgctgcataccgctaaacaattttttaccggtagcatcagtgacctccagccagcaatcggcagtaaagttcatcaccagcgcattcggatcagccaccggcgtggtcacgccagcctgatcggttggcaacggcgcagcaccatctggcgttgttgctgccgttggtgccggggtcgcggcggtatcaacatttgcctggctagggctaacaaccgcattctgttgcggatcaacagctggtgctggcgcagttacggcaggtgtttgcgtgttggttgcggtagtatccacagacgctggcggcgtggacgttgtagccgggtctgtagttgtgctcgtatttaatggaacactctgcccctgctcgctattactgctcagttccgcgctagattgatcggccatagtggtgatctcttcctgctgagctttgcggtcttgccaccaccaggcaccgctcaggccgataaccacaaacaacaccagccaagtgaaggtcatcagccagccgtcgcgttttttgcggcgtttaccgagggaaaaactctgcatcggcgcaacttttgcagcccgaagtggagcctgcttttccagccctggcagcagttcttcttctggaatatgtaccagacgcgcataagagcggatatatccgcgcaggaatgtactagcaagatcggcgggtgccttatcttcttcaatgtcgcgtaccgtggaaaccttcaggcaaagtcgctcggcaacggcctgctgactaagtcctagttgttcgcgagcattacgcaggcgagcgccggtagtaagtgcttcattttggtcgtgcgtggcttcagtattcattcgctgcaggtacgtttaaatgagaattgagatgccggtgaaccatcatgctcacccacaccgcgaaacatccgttaagttaaccgttatcatacagtataagaccgtctgtgtgctcgtgacaaagcccacattcactaaggctaacttactgttgcatcgttacatactgccttaaagtcagcaaaaacgcaccgttaatattgaccagacaattgcaacttaatacttcattcataaaacattacgccacggtacataaagtaaccgtggcgtaatggctatcagaccgctttaatgtcgatggcttcaccctgcatccgtttacgcagggtacgtttcgtacggtcgataacatcgcccgccaactgaccacaggcagcatcgatatcatcaccacgagttttacgcacaatagtggtgaaaccgtagctcatcagcactttactgaaacggtcgatacggctgttgctgctgcgtccatacggcgcacccgggaacgggttccacgggatcaggttgatcttacacggcgtatctttcagcagttccgccagttggtgcgcgtgttcagtgccgtcgttaacgtggtcaagcatcacgtattcaatagtgactcggccctgattggcgttggatttctccagataacggcgcaccgcagcaaggaacgtttcgatattgtactttttgttgatcggcacaatttcgtcacgaatttcgtcgttcggcgcgtgcagggaaattgccagtgcaacgtcgatcatatcgcccagtttatccagcgccggaactacaccggaagtggaaagcgtgacgcgacgtttagacaggccaaaaccgaaatcatcaagcatgatttccatcgccggaacgacgttgttcaggttgagcagcggctcgcccatgcccatcatcactacgttagtgatcggacgctgaccggtgacttttgctgcgccgacgattttcgccgcacgccacacctggccgataatttcgctcacccgcaggttgcggttaaagccctgctgggcggtggaacagaatttacactccagcgcacaccccacctggctagagacgcagagcgtggcacggtcgtcttccgggatatacaccgtttcgacgcgctgatcgccaacggcgatcgcccatttaatggtgccgtcagaactacgctgttcttcaaccacttccggtgcgcggatttccgccacctctttcagtttgccgcgcaacactttgttgatgtcggtcatctcatcaaagttgtcgcagcaatagtgatacatccacttcatcacctgatcggcgcggaagggtttttcacctaaatctttaaaaaactcccgcatctgctgacggttgagatccagcaggttgatttttccatctttcgtggtgacgttttcaggtgtgactaattgttcagacatatgctattccggcctcgttattacacgttatggcccctggagggttgaaaaaagaaacgccccggtgagcggctgctcgtccgggggcgctgcattgtacaaattctggcgcacggatgccacgtttgcacgcggcatttacgaaattattaacgggtgcgcgggcacacttcgccttcgccaaagaaataagcgatttcgcgagcggcagattcgacggaatcagaaccgtgggtaccgttttcggtcaggctgtcagcgtaatcagcgcgcagagtaccagccagtgcgtttgccggattggtcgcgcccagcagatcgcggtgacgctgaacggcgttttcaccttccagcacggaaaccacgatcgggccagaggtcatgaattcaaccagaccatcaaagaacggttttccatcgtgttcagcataaaagccacgtgcctgttcaacggtcaggtgcagcattttggtgccaacaattttgaaccctgcagcttcaaagcgcgcaaagatattaccaatgacgttttttgctaccgcgttcggtttgatgatggaaaaagtacgttcaatagccatttttacctctgtaaattgttctgttgttgtctgtaccagcgtacgagatggcgcggattataatgagcaacagggccgttgactattgatgaaggtaacatttttttaaaataaaatgagttttagcaacaatcagggacaaaacagattattgcatgacaaatttcactgtcgcgatttgccccacgtcatccatcaccagcaattgataatcacctttatccgtcaaatgcagggtcacgttgcgcccgcgttcagttaacggttcgccattcagaaaccaccagcgttcacctgcccctccactactttgcaacggcaaagtcgcttccgctgcgcccggtaaacgtttaataatcgcgccatcgcgaacgcctgtcagctgcagcgggagctgggcatcgtgaccgtatggcgggcaacttgtgctggccggtggtaagcgcacagcgcgacgttcacttgcgggcagccagggttccagcggtagcggccagacatttatcatttcttgtcgcgcttgcgggcaatcagcggcaacacgtttgccattttcatccagccagatggggaaacgaatgccattaatgccttcctgctccggcagtaatagagttggcggctgactcccgtccagcagccaggttgccaggcggcggcgacagttaccgtcaccttccggcaaagactgtccgcccggccagcagataacgccacgagtgacactgttcgggcgcgggtcttccggcagattcgcactgcggctcagtaagatattattgacctgattcaacaatggtacggcactggcaaagccaaactgaccaacaacgggcgtgccgtccggtctgccagtccagatcccaatgacatagcgagcgttaaccccaatcgcccaggcgtcacgatagccatagctggtgcccgttttccatgccagtggggcgacgcgcggcaaggcactatccggcaagggttgcgcttcatcagccataatccggcgaatgatccacgccgccccgctgctcattaaaggccgttcaagcagcggatcgtcaggctgtaagcgcaatttgcctgccttgccgtggcgagcaaacgcggtatacgctgccgccatatcttccagttttgcaccagcgccgccgagaatgagactaagattcggcgcagcaccgttgggcaaatataacggcaatccaacattgcgtaactttgccgcaaaccgtttcggtccataggcttccagcacctgcacagcaggtaagttcaggctgcgcaccagcgcctcgctcatgctgatcgggccatgaaaaccgctatcaaagttacctggtcgataatcaccggtgcgccgggggacgtcttgcagcagacttgccgggtggatcaagccttcatccagcgccagaccataaacaaacggtttgagcacacttcctgggcttcggatgctattgaccatatcaacatgaccaaagcgactatcatcgttgagatcaacgcttcccacccagccgcgaacacgcatatcggtatgatcaaccacgatcatcgccagactgctgcgcggtggcaaccgccctttccagttttgcgccagttcttccagacgtcgttgaagaccggcatccaacgtagtagtgattttgtcgcttttgcttttaccgagcatcatgcggctaaacagcggtgccagttgcggcatttgtcggggggccagccagatgggttcttccctactctcttttacctgctcacgggaccacacaccttgcacggccatccgttcgagcactttattacgcgcggcttcggcacgctccggccaacgatccgggcgaagacggctgggcgcttgcggcaaaaccgccagcattgccgcctcggaatagcttaaattcgcagggctttttccgagataagcccaacttgccgcaccgatcccctgcaacgtaccgccaaacggagcgcggttaagatacaaggtcagaatttcacgcttagacagatgccattccagttgcaacgcgcgccagagctggcgaattttgccgccaaatgttttggggtgaggatcaagcagacgagcaacctgcatagtgagcgtgctgccaccggaaataacccgtccgctagtgagatcttgccatgctgcgcgcgccacgctgaatggattcacccccggatgcttccagaaccagcgatcttcataattgatcagcgcttcaaggtaacgtggagaaacatcttcgattgttaccggataacgccagatgccgtcagcatcggcgaagcgccagagcggcgtaccatcctgcgccacgaccactcgtgcgggattgacttcatgcagcggtagaggccagagtttatctgctccccacgctgcaagaaaaaggagaaagggcgcggctgccaacgttatccagcagccgcgtttggttaacaagcgaggcatttacggtctgacaatcagcagatcttcagccgcgccggtcgcccgccattggggaacatacatactttccaccatcggttgcggtacctgatacgttcccggcgtcaccgcccgcgccagatacaccagcgttaccggttggtattcatcaacggcaaccgccgccacaaagcgatcgtcacggaactcaatgtgcttaatgctcgcctgctgcatctggttcagtaagttctgcacttcgccaccactttgctccaggctggcgctaccgttcgccagattctggttttccagttccagacccgcaggcagcagatccacgactaacgcatccggcacgctgttactggcttttacctgcaaccacaccagcaccagatcgccgctacgtaagctgtccaggcttttgctcttaccatcagtaccaagaatatgacgctcgatttgcagcacattgttcgccggtaaaggtgcggattgcggataaccgctggcatccatacgcaaccataacggctgatcgccactgttgctcacctgcaaggtgacaagttgatcgctattcagattgctgttttgcgctttctcgcctgtcagctgctcagcactgaaagaggtttgcgcctgccatttaccgggtaaatcctgaatcgtacgggcagccaggaacaacgcgttactttcctgcgtgcttagccagcgttcaccaaacgcctgctggctaagtgtgttcagcaaagtgtactgctcatcgggtagcagtttattttcttccagcaaggagagcattaacgcgttgtcgcgcagactactaccgtaatcacccagccatatccgctcatcactattacgcggcgttttcagcgccagcgcaatcgcttcttcaccacgcgtcgcatcacccatggttttcagcgcaacgccaagttgcagcagcggtaaaccagaagcggcatctgcacgatgctcccagatttcacgcagcgcacccagcggagccttttgctgacgggccaacaccagcgcagcgtaagactgtacggcgaatttactggctttgagattatccgcgtacgggatgctcatcatgcccggatcttgtaaatagcgcagcagacgctcattaccccggttaatggcgtctgtcggcacgctgtaaccctgttcgcctgcgcggaccaggaaatccatcacgtaagccgtcagccagtactcttcgtcaccgtttttatcccacagcgcaaagccgccgttatcacgttgcatttgcagcaaacgggaaatgccgatatcgacgcttgcacggcgtttctcatcactgtcgcctttgatgcccaacgcctgcagttgggctgcgttggtataaagactcggaaacaggccgctggcggtttgctcaagacagccgtacggatacgcttttaactctttgatataacgtgcgatgttcagcggtggtttgccgctcaacaacaattgcccttccagcgtaacagggctgaagttttgcaatccatccgccggaatcgcccatgtctcaccaggctgtaacgccgtaccgtaattaaccgtttgtgccgggaacgccggacggacgccgattttccactgcttatgctgatcggcaacggtttcacccggtaacgctaacccgctaatggtggcctgaatttctccatcgccataacccggcaatgctcgcaccgggataaacagcgtagtacgcacacctggcgctaattcaacggctgcgggactatcgctgaccagttcaagcaaaccactggcggtcagggcaacgttcagtttttgcggtttatcggtaagattagtgatatccagcgtcagacggctggtatcgccactcgccataaagcgcggcatgttcagttcagcaatcaccggtgcggcaactatcactttactttcgttgctaccgaagtcatctgccgtccaggcttgcgccatgacgcgcaattcaccgttaaaatcgccaatcggcagtgtaacgctgccttcgccctgttcgttgagcgttaccggcagcgcctgctgcacgacaatattgacgtgattgaccggcggtttaccaccacgtttcagctcatcaccatcgccaccgaaacgcagagctgccagacgcccctgaccttcaataacctgaccgtaaatatcgtaaatgtctgcgccatagcgtttctgaccaaagaacgcctgccacggatctggcgtgacgtagtcagtaatattcagcacaccactatcaacggcagacaccagcacattcacctgtttaggcttctcgccatttttagtgctggctttaattttcacggttaatggttgattgggacgcatttttgctggtgtttccagcgccagatcgaggcgacggttttcatcgccaagcggcagatgcaacacaccaaccgcgcgttttggcgtcgcggagcgagatttatcgccaggacgtaccaccagcgtacttaaatacagatcatgacgattccaggttttatcgaccggaatcgtcagatccagcccttgagcccgaacatcaatctcttgccaccacagcggcccttcactggactcgaccatcgcataacctttacccgccgttggcgcggcgatatgcaacttaatggtgtcgccagggcgataactggctttatccagtttcagcgtgacacggtcgggtcgcactgcgccgctaccgtcgctgttgtcctgccagctatagccagcccagaaacgaacactactgaccgcttcattcggcgctttgacttccagacgataagcgccccactctaccggaaaactgaccttgccggtttcgtccgctttcagatccagagtttgttcattttcgatcagatctttttgatcaaactgactctgccagccttcatcttcactccagttccagtagtaatcgcggcgttcgcgaatcaggcgcacctgcaagccgctcacggcttttttcacgccttgcgcatcgctataaacgatgtcaaaagcggcgttactgccttcatcaacaatgggctgtttcaccgtgctgtcagtacgataatcgtaaacgcttttgctggcgaactgcggacggatccccggcaatgcatcggcaggccagatagcctgctcagcgcggcgcgtcaccgggcgaccgccgctttccagcaaactaccctggaaaataacctgtaatggggaatgcgtttccttccactggctttctgtagaaacttcgccgcgccctttatcatccagcgtcaactgaacttcatccagcgtgcgggaaagattttcggcagctatatcgccgaattcaaaaccaggtaaggcactcacagcttcacgcagtgggcgcaggaaaagttgcccttgcaaagtattaccattagcaggtgcaccatacaggtagtaccccaccacggagaatttcacttcatctttcggcgttagcggggttttctcaccggtcagattcagcgccatgcgctctggcataaaatcttcgacgtggaaatcccacatccgatactgattatcgcccgtgttagcgcgaatatgccacataccggttgccgcattgctatcgagtggccaggtaaagtggtagaggccattctccggctgactaacgacgctcctgagtacctgcccatcgggtttaatcacgtctaacttgatgggttgattgggcaacgctttaccgtctgcatcacgcagcaaaccattgaggattaccgtttcacctgggcgataaagatcgcgtgggccaaacatgaaaaactgtttgctatagcctggcgcgccagcaatgttaaattctgctaagtccagcgccggaagttttaaatcgagtagcgttgtctgaccgtctttacgcgccaacagtaatgccgcgtttttatcattttccagctgcacatgcccctgagcgtcactggttgcctgagtcagagtctgccctttctcatttaataaagagacttcaattccttgctgggccgcgccgttttccagactttgggtaaagatatccagacgattgtgataacggtgagcactaacgccgatatcacttaacgtaaacagcgtcgcgggattactgtaatcgtaacgtccagcctgattcatcacagccagatacacgcccgcctgctgaagcggtttgatatcgcccagcggcagcaataatttttcacgggtgttacgcgcaggattgagatcaaaccgtccggtgtagaccagatccgccatctgcagcagtttgtcactctgccagttcgccaggctattgcggtattcccattggctaatgaatgctggcagagattctggcttaacgcggaagaagttaacatcgacattattaacgttgagcgccattaccggcagcccttcaacgactttgccaggcagcaggctaccacggctggcaaaaccgacgctgggttggatgtcgcgggtagttatagttttttcgtaatctttactgaaggttgcgttgttgagtgctttgacctccttgccaatagtaacgatcaaatcacgtttcggttcgaggtggcgtaaacgtaactctttaagattatcactcagctcccaggcaccatccactttgccgctttttttatcgacgacatgaataacgcgactgaaatcctgatccgggtcgagagggatggagaacgtcagcaccagcgtggctgcaccatcaagttggacttcagagagatccagcaatgtcagcaccttaccggcactctgttgggccagtttttgtctctccggcacggagagttttgcactactcgcgttttcactagaggccgctttagtaacttcagaaggcgcatcttttttcaccgctgttggcgcgttatcgttgttgtcgcaccctgccagcgccagcattagcatgcaggcggctacgcgtaactttttcatttttcatccctgccacaatggcccgttagcaacgtcgaataattattatgcgtgagaatttacgttatgtaattcagtatcacgcccatacaatccgaattttagtgagaattgtggctcagacagccaaatcagcctcttttgcttgtcgcttttcactaaacatccgacaatttagcctaaccccggcaaaaatggagatgcctatgtccacgacatggtttgtaggagccgactggctcgccgaacatattgatgacccggaaattcagattatcgatgcccgcatggcgagccctggacaggaggatcgtaacgttgctcaggagtatctgaatggacatattcccggcgcagtgttttttgatatcgaagcgctttctgatcacacttccccgcttccgcacatgctgccgcgcccggaaacgttcgccgtggcgatgcgtgaattaggcgttaaccaggataagcacctgattgtctatgacgaaggtaatcttttcagtgccccacgagcatggtggatgctgcgcacctttggtgtagagaaagtgagcattctggggggtggacttgcaggctggcagcgcgatgatctgctgttagaagaaggtgcagtagagctgccggaaggagagtttaacgccgcgtttaatcctgaagccgtggtgaaagtaaccgatgtattattggcaagccatgaaaatacggcgcaaattattgatgcccgcccggctgcacgttttaacgcagaagttgatgaacctcgcccaggtttacgtcgcggacatattcccggagcactgaatgttccgtggacggaactggtgcgcgaaggcgaactaaaaacgaccgatgaactggatgcgatattttttggtcgcggcgtcagctacgacaaaccaattatcgtcagctgcggctctggtgtaacggcagccgtggttttgttagcactcgcgacgctggatgtgccaaacgtgaaactgtacgacggcgcatggagtgaatggggcgcgcgggcagatttaccggttgagccagtgaaataagtattttacaggcaataaaaaaccgccgaatttggcggttttttattgctagtctggttcgcggcctttccagcaggttgacttgtgttacatgagcaacgcaggtgcttcacagcaaaacaatactcaccagtaactctctttttgtcaagcaaaagagagtaattattgtttatttagcgtattatcgacaccggccctttccgccgtgttcggtaataaaataacctggcttattagtccgaattcagacaaatataaataaatcctgctcaaaattaaaaattctaaccggtaaaagatattacttaaacatgtaaattcactttcctttaaaaaacaaaaaaccgccaaaatcaggcggttttttgttgctggtccggttcgcggcctttccagcaggttgtattaccgtagtaatgcaagcgcgtctcagcggagacaatactcgccagtaactctctttttgtcaagcaaaagagagttattattgttctgttagtgtattatccactgcggccctttccgccgtctcgcaaacgggcgctggctttaggaaaggatgttccgtggccgtaaatgcaggtgtttcacagcgcttgctatcgcggcaatatcgccagtggtgctgtcgtgatgcggtcttcgcatggaccgcacaatgaagatacggtgcttttgtatcgtacttattgtttctggtgcgctgttaaccgaggtaaataataaccggagtctctccggcgacaatttactggtggttaacaaccttcagagcagcaagtaagcccgaatgccgccctttgggcggcatattttagattatccgattctgtttaaagtcacgcaaaaaaccaccccagcgacgttcatagaatggcgcaatatgttcggtaataaagtggctaattcctttttccccttttttcacctgacaaatatcgattggttcatcgccaggtaatgtatcggtcgctacacttcccgtcgcctgaataatttcttcgatatcaccatcggcttcaatgccaataagtaaattaggctgtgcctcttcgttctctttaatactacaaataaaagcacgcttcaccggcttaatggttttaaataaggtggtgagactatcaatcatttgtgctggcggctctgcgacttcgcttaatatcaggctttcaccgccttccaggatttcctggctgctcagcggatttccctcttcaccaatcaacaaactgatttcacgcggcataaattctttaccggttggcagtttggcattaaggaagagcgtttcgccaagtgtcatctcaaacagcgtgcgaacgggcattacgacaaatgcctgttcgtcttcaaccgcctgttgaagtgcttctaagctggtgaaaaaaggaatgacgctggtgccgtcttctttttcccagtgctgtaaatcaagcgcgctatcttcaaccacagcctcgccctgcgccgccgtaccaggcacccagacggtggattccagtagagtacggaaaaaggccgggcggtgcgccggttcagttgctgctttttccagcaggtcttcaagttcgttttttgtttcggacataagaaccacaattcattcaacgttcggggcgcaaatgcctgatgcgctacgcttatcaggcctacaagggattcgcaatttgttgaatttgcagaatttgtaggccggataaggcgtttacgccgcatccggcatattagtttacgccgttaacagattagctatcgtgcgcacaccaagtcccgtagcgcccgcagaccactgttcaaccggcgctttacggtaagtcgcgctgcagtcgatatgcagccagccttgctgatagttctcaacaaagtggctcaggaagcccgccgccgtgctcgcgcctgccggatacgccgcgcttccggtattgttcagttcggcaaagttagacggcagctggctgcggtggaactccgccagcggcagacgccagaacggttcgttctcctgcgcggcactcgccagcaagcgaccggccagcgcatcgtcaaaactgaacagcgcgtgataatcattacccagcgcagttttcgccgccccggtgagggtcgccgcatcaatgatcatttccggtttctgcgcactggcatcaatcagaccatcggcaagcaccagacgcccttcggcatcagtgttcatcacttcaacttttttaccgttgcgataggtgatgatatcgcccagcttgaacgcattgccgctaatcaggttatccgcacagcagaggaacagcttcacgcgcttgttcagtccgcgcgtaatggcaaatgccagcgccccggtaaccgttgccgcgccgcccatgtcgctcttcatgctgtccataaacgcagtctgtttgatgctgtagccgccggagtcaaaagtgatacctttacctaccaggcacgcgtacactggcgcttctttatcgccagttgggttgtaatccagcgccagcaataccggagaacgttcactaccgcgtccgactgtgtgcagccccatataaccttgctcacgcagatcttcgcctttggtgatccgataagtcacacgatcgcccgcgacgttgctgatcagatcaacagcacgctgtgccagttggcttggtcccaattcttctgccggtgcgttgatggtgtcacgcacccagtcgatgatcatcaggcggttatccagttcctggcgctgggcatcgtccagatccggccacaccactttacgcgtgcctttcggggctttgtaaccttgccagaatgcccagcagcgatccgcatcccagccttcaccgcttaactgaacatgcttgatgcccagaccgtcaatcttgcgcgccgcacgctggatcagccccagatcgtctgccccgttcaaatgcagggtaatgccgtcattattaatgctgtaagttgctttttctccccagcgcgcgtcggcaggttgggtagagagggtaatcttcatcgcttctgtcattttagttatccttctttgtaaaagggccgccagttggcagccccaggatttttccgctaaatgattcgcgttgcaggaaggcggcaagtgagtgaagccccaggagcatagataactatgtgactggggtgaacgagcgcagccaacgcatctgcggcgtgaagcatgacgcggaaattattcggcctcgtccagccagactaacaaaatcgcttcgaggattttctcgttggatgcctgcgggtcgtcgtcgaaatcttccagatcgcaaatccactgatgcatatcggtgaatcgaaccgttttcggatcaagatcgggatacgcatcgtacagtgcttcgccaatttcgcggctatcggtccacttaagtcccatactaacctctgttaatgctcacgcgcatggttgatagtgtaacgcgggatttcgactactaaatcttcgtcggtaacgcgcgcctggcagcttaaacggctttccggctccagtccccaggctttgtccagcatgtcgtcttcctgctcactgctttccggcagactgtcaaaaccttcacgaacgatgcagtggcaggtggtgcaagcacaggatttttcacaggcgtgttcaatctcgataccgttacgcagagctgcgtcgagaatggtttcaccgctattagcttccagaacagcgccatcagggcagagatcctgatgaggcaaaataacaatctttggcatattaaacctcgtccacggaatggcctttcagcgcacgacgaacgctctggtccatgcggcgagcggcgaaatcctgggtttgtttgtctacgtttttaatcgcttgttcgatggcgtcaacatcatcgccctgcgccacttcactcaggtgagcggcagcatcgtcaatgacctgacgttctgcggcgcttaacagcgcggcatcagcagccagcgcgccgtgcagactttccagcacacgcgccgcttctactttttgttctgccagcattcgggcttttacgtcctgctcggcatagctcatactgtctttgatcatgctagcgatttcgctatcggtcagaccgtaagacggtttgacctgaatagacgcctcaacgccggtggatttctccatcgccgtcacgctcaaaagaccgtcggcatcgacctggaacgtcacgcgaatatgcgcaccgccagccggtagcgccggaataccacgcagcgcaaaacgcgccagactgcggcagtcctgcaccagttcgcgctcaccctgcattacatggatagacatcgccgtctgaccatctttaaaggtggtgaaatcctgagcgcgggccaccggaatagtggtattacgcggaatcactttctccaccaggccgcccatcgtttcgaggcccaggctcagtgggatcacatcaagcaacagcatttcgctgtctggcttgttacccaccagaatatccgcctgaatcgccgcgccaatagcgacgactttatccgggtcgatggaagtcagcggtggacgaccgaaaaattcgcctacccgttcacgcaccagcggcacgcgagtagaaccgcccaccatcaccacttccagcacttcatcagcttctacacccgcgtctttcagcgcgcgacgacaagccagtaaggttcgttttaccagtggcgcgatcagttcattgaattgttcacggctgatttcgccctgccagcccgcaacgttaacggtcacggagtccgcatcgctcagcgcgattttggctgcaatggcggcatccagcagttcacgctgaacgcggttatcgctacgatcaggaatgcccgcctgctcgcgaatgtaatccgccagcagatggtcgaaatcatcgccgccgagcgcggaatcaccgccggttgccagcacttcaaacacgccgcgacttaagcgcagaatggaaatatcaaacgtcccgccaccgaggtcataaacggcgatcacgccttcctgaccggaatccagcccgtaggcgatagccgcagcggtcggttcgttaagtaagcgcaggacgtgaaggcccgccagacgcgccgcgtctttggtgccctgacgctgggcatcgtcaaagtacgccggaacggtgataactacaccatccagctcgcctgccagggcttcagttgcccgcgccgccagtgctttgaggatgtccgcagaaacgcgcaccgggttcagcagccccgccgccgtttcaatcatcggcaggccgttttcgctggcctggaattgataaggcagatgcggatagcgttgctggatatcagccaggctgcgtcccatcaggcgtttaacagaactaattgtgttggcggtatcgagcgctgcattagtacgcgcgtcataacccacgctatgcccttgctgttgatagtgaacaacagatggcagcaggtgacggccttcatgatcggctaacgtttcggcctgaccgctgcgcactgtcgccaccaggctgttggttgtgcccaggtcaataccggccgccagacgacgctgatgcggcgcagcactcaaaccaggttcactaatttgtaataaggccatgtttagcttccagaaattaaaaatcgagcagtttttcttcgagttgttcggcactgcttcgcagtttatcgagaaaacgcagcttacgcacggtatccgccgccgcgtcccacgtctcgttgtctaactgttcaaccatcaactgatggcgggtatcaaacatctttttcacacgtttgataaagctttccagccgcgcttcatctttcgcctgttcgatctcgtccagctcttcgcgcagctccaactgttccatcaggaacgcggtgtcgcgcacagtatgctgctcgctggcgagatcaaagccgtgcaaagaaagcaaatattccgcgcgcattaacggatgacgcagcgtttgccaggcctggttaatggttgcagattgctgtacggcggcgagttgttccgcctggcttccgctggcgaatttatcaggatgatactgacgttgtagatcctgaaaacgcaggctcagcgcctgggtatcgagttgatagcgggcaggcaagccaaagagggtgaagtaatccataacattctcagggctgcgatccgccgcgataacggcgaatcaggtaaaacaaaccccacgcgcaggcgaccacggtggggttatcggtatgcgcatcaaacgtggaagctttcgccgcaaccacactcatctttgacgttcgggttggtgaatttaaacccttcgttcaggccttcttttacgaagtccagctgcgtaccgtccagaaattgcaggctcttgccatcgaccacgactttcacgcctttgtcttcaaacacgatgtcttccggcgtcggttcgtcaacaaattccagtacataagccataccactacacccggaggttctcacgcccagacgcaggccaaaccctttaccgcggttagccagaaaggtatttactcgcgctgctgcactgtcgctcagtgtaatgctcataaccaaacctcaactcttattttgcttcacgtttgcttttatagtccgcaatggcggctttgatcgcgtcttctgccagaatagaacagtgaattttcaccggcggcagttcaagttcttcagcaatatcggtgtttttgatcgcctgcgcttcgtcgagagacttccctttcacccattcggtgaccagggagctggaagcgatagcggaaccgcagccgtaagttttaaaacgcgcgtcttcaatgataccttcatcgttgactttaatctgcaacttcatcacgtcgccacaggccggtgcccccaccatgccgctgccgacgttctcgtcgttgttgtcaaaggaacccacgttacgcggattctcgtaatggtcgataactttttcgctgtaagccattataaattctcctgattccgataccgattaatgatgagcccattcgatgctgttcagatccacgccctgcttgtacatttcccacagcggagaaaggtcacgcagacgaccgatggatttacgaactaactcgatggtgtagtcgatctcttcttcagtagtaaaacgacctaaagagaaacggatagagctatgtgccagctcgtcgttcagccccagcgcgcgcagcacgtaggacggttcgaggcttgcactcgtacaggcggaaccactagaaactgcgaggtctttcagcgccataatcaggctctcaccttcaacgtagttgaagctgacgttgagaatgttcggcgcaccgtgttccaggtcaccgttcaggtaaacttcttcgatatctttgatgccgttccacagacggttacgcaggccgcgcagacgttccatctcggtcgccatctcttcttttgcgatgcgataggcctcgcccattccgacgatctggtgaacaggcagagtgccggaacgcataccgcgctcgtgaccgccgccgtgcatttgcgcttcgatgcgtacgcgcggtttacgacgtacatacagcgcaccgatacctttcgggccatagattttgtgaccggagaaagacatcaggtcaactttcaactggctcaggtcgataggcagtttacccacgctctgggttgcatcaacgtgatagataatgccacgagcacggcacatttcgccgatagccgcgatatcctgcaccacgccgatttcgttatttacgtgcatgatggacacgaggatggtgtcgtcacgcatcgctgcttcaagttctttcaggtcgataatgccgttacgctgcggtgccaggtaggtgacttcaaaaccttcgcgctccagctgacggcaggtatccagtaccgctttgtgttcggttttgctggtgatgatgtgcttgccttttttctgataaaagttggctgcacctttgatcgccaggttgtcagattcggttgcaccagaggtaaagacgatttcacgcggatcagcgccgaccagatcggcaatctgattacgggcgatatctaccgcttcttcagcctgccagccgaaacggtgagaacgggaggccgggttaccaaaggttccgtccatcgtcataaactgcatcattttctcggcaacacgcgggtccaccggcgtggttgcggagtagtcgagataaatcggtaatttcattgctctataaactccgtacatcactcaatgcaaggaatcaggctaccggctggatgtacgaccgtgtttacggagtatttagcactccggcctgattctgaattctttttattaagcgcgtaacttaacgtcgatcgcgtcttgtgtgcgggtgcgtggcgcgtcgtgagtatgctgacgaccagacacatccagcacttcctggttattaaccagttcgcctaaagtaatgttgttgagaaaaccggtgagacggtcgctcaaatcacgccacagcgcgtgggtcaggcatttatcgccgccctggcagccgcctttaccctgacaacgggtggcatctacagattcgtcaacggcgctaattacttcgccaacggcgatgctgctggcatctttgcctaacagataaccaccgcctggtccacgtacgctggaaaccagaccatttttacgcagacgggaaaacagttgttccagataagaaagggaaattccctgacgttcggaaatatcagccaacggtaccgggcccgcttcagagttgagcgcaacgtcaagcattgcggtcacggcatagcgccctttagatgtcagtctcatgtcttacttcacctcaaactcgcccctgcccggggttttttattgtaaaagtgggggtattgcatagcagggtcaagtctgacattcccgagtaaattggtcaactatttacttgactgatttagtcgggtatttaaccttcagtgccatttttttatcgtggcgtttgtacctgttgtcggatgcggcgtgaacgccatatccgccctggggttctgtacactgtaggcctgataagacgcattacgcgtcgcatcaggcaacggctgtcggatgcggcgtgaacgccttatccgacctacggttctgttcactgtaggcctgataagacgcattacgcgtcgcatcaggcaacggctgtcggatgcggcgtgaacgccttatccgacctacggttctgttcactgtaggcctgataagacgcattacgcgtcgcatcaggcaacggctgttattcggccttgttacctttattctgctgctcaatagaagccagaatcccgcgcaggatattcaactcctggctttccgggcgcgcacgggtaaacagacggcgcaatttattcatcacctgccccggatggttttcacggataaaaccggttgccagcagcgtttgttccagatgaccataaaaacgctccagatcatcgaccagcggatacggcgtctcttcatgctcgacctgctcgccgttttcctgagttgccagccaggccatgcgcacttcataggcaataacctgaaccgccatcgccaggttcaggctgctgtattccgggttagccgcaatcgcgacatgataatggcatttctgcaactcttcattggtcaagccgacgcgctcgcgaccaaacaccagcgccaccggggtatttgccgcttcagcgacgcttttcaggccgcattcgcgcgggtcgagcatcggccatggcagcgtgcgggaacgtgcgctggtgcccaccaccaggctacaaccggctaacgcttcgtcgagcgtatcgacgatgtgagcattaccaatcacatcgctggcccctgctgccagggcaatcgcctgggagtcgggtttcaccagtggattaaccagccacagattggttaatcccattgttttcatggcacgggcaacagaacccatattgccggtgtgactcgtctccaccagcacaattcgaatattttgcagcattgtctttcttcatctaaagattattcacgcatcttatcataaaacgaagacagatgccgatctcgctgctatactctgcgccgttttcccgttctttaacatccagtgagagagaccgatgcatccgatgctgaacatcgccgtgcgcgcagcgcgcaaggcgggtaatttaattgccaaaaactatgaaaccccggacgctgtagaagcgagccagaaaggcagtaacgatttcgtgaccaacgtagataaagctgccgaagcggtgattatcgacacgattcgtaaatcttacccacagcacaccatcatcaccgaagaaagcggtgaacttgaaggtactgatcaggatgttcaatgggttatcgatccactggatggcactaccaactttatcaaacgtctgccgcacttcgcggtatctatcgctgttcgtatcaaaggccgcaccgaagttgctgtggtatacgatcctatgcgtaacgaactgttcaccgccactcgcggtcagggcgcacagctgaacggctaccgactgcgcggcagcaccgctcgcgatctcgacggtactattctggcgaccggcttcccgttcaaagcaaaacagtacgccactacctacatcaacatcgtcggcaaactgttcaacgaatgtgcagacttccgtcgtaccggttctgcggcgctggatctggcttacgtcgctgcgggtcgtgttgacggtttctttgaaatcggtctgcgcccgtgggacttcgccgcaggcgagctgctggttcgtgaagcgggcggcatcgtcagcgacttcaccggtggtcataactacatgctgaccggtaacatcgttgctggtaacccgcgcgttgttaaagccatgctggcgaacatgcgtgacgagttaagcgacgctctgaagcgttaatgactcaggcgggtgatatcactcacccgccctcgcctttcaggcgctattccgaaatacttcctcactgctttactttctttcgtcactctcccaccatctttccccgattaatggatgataaagaagagccaaggaaaggttatggcactgccagtgaacaaacgcgttcccaaaattctgtttattctctttgttgttgccttctgcgtttatttagtgccgcgcgttgccatcaacttcttctattatcccgacgataaaatttacggtcccgatccctggagcgcggaatccgtcgaatttacggctaaggacggtactcgtctgcaaggctggtttatcccttctagcacgggccctgctgacaacgccatcgcaaccatcattcatgctcacggcaatgccggaaatatgtccgcccactggccgctggtcagttggttacccgagcgtaatttcaacgtttttatgtttgattatcgcgggtttggtaaaagtaaaggcacgccgtcccaggccggattgctggacgatacgcaaagtgccatcaatgtggtgcgccatcgcagtgatgtaaacccacaacgtctggtgctgttcgggcagagtattggcggggcgaatattctggatgttattggtcggggtgatcgtgaaggcatacgtgcggtgatcctcgactccacatttgcctcttatgcaaccatcgccaaccaaatgatccccggcagtggctacttacttgatgagagttacagcggcgaaaattatatcgccagcgtcagcccgatcccgcttttactcattcacggtaaagctgatcacgttatcccatggcagcacagcgaaaagttgtatagcctggcaaaagagccaaaacggttgatcctaatcccggatggcgaacacattgatgctttttccgatcgtcacggcgatgtttatcgcgaacagatggtggactttatccttagcgcgttgaatccgcagaactaacccatgatcgctagcacgataatcattcacaaaaccaccttaagacatgctaatccactggtcagaacagtttaagatgagaaaaattctgtgacgcttgccaacatttctgatgattagcattcccttcgccatttccttgagcaaactttagctattcttatcaattatgcttatgggagatctacagatgatgcctacgcttgctccaccatctgtccttagcgctccccagcgccgctgccagatcttgctgacgctctttcagccggggttgaccgccaccatggcaaccttcagcgagcttaatggtgtggatgatgatattgccagtcttgatatcagcgaaacaggacgggagatcctgcgctatcatcaactcacactgacgactggttatgacggtagctaccgggttgaaggtacagtgcttaaccaacgtttgtgtttatttcactggctacgacgtggtttccgtctgtgtccgagttttattaccagccaattcacccccgccctgaagagtgaactgaagcggcgcggaattgcgcgtaacttttacgacgataccaatctacaagcgttagtgaatctctgctcccgacggctgcaaaaacgctttgaaagccgcgatattcatttcctgtgtctgtatctgcaatattgtttgctgcagcaccacgctggaattacgcctcagtttaatccgctccaacgtcgctgggcggaatcctgccttgaatttcaggtagcgcaggaaattggacgccactggcagcgtcgggcgctccagcctgtaccacctgatgagccactgtttatggcactacttttttccatgttgcgggttcccgatccattgcgggatgcgcatcagcgggacagacaattgcgtcagtctatcaaacgtctggtaaaccattttcgtgagctgggaaatgttcgtttttatgatgaacaggggttatgtgatcagctttatacccacctcgcccaggcgttaaatcgcagtttgtttgccatcggtattgataataccctgccggaagagttcgccagactgtacccacgcctggtgcgcaccacccgcgcggcgctggccggatttgaaagtgaatacggcgtccatctttctgatgaggaaagtggtctggtcgcggtgattttcggtgcctggctaatgcaggaaaacgatctgcatgaaaaacagattattcttcttaccgggaatgatagcgagcgagaagcgcagattgagcagcagttacgcgaactaacgttactgccgctcaacattaagcatatgagcgtaaaggcatttttgcagacaggcgctccgcgtggcgcggcactgattattgcgccttataccatgccattaccgctctttagtccaccgctgatctatacggacctgacgctgacaacacatcaacaggagcagatccgcaaaatgctcgaaagtgcatgatcagcaactgggaacaactttcgggcgcaaaaacattgccggaagcgccaccagcgccattacccagaacacgccgtggcccagatattgatacaggaaaccggcgaaaacggtcatgatagcgatactgccgcccatcgcgacggcagagtaaaccgcctgtaaacggatgacttcgctaccctggcgagcagcaatataacgcatggcggccaggtggcagaccgtgaaggtgccgcaatgcagaatttgcaccactatcaaccacggcaacgccgtagttgctcccataatgccccagcgcactacgccgcaaatcgcgctgatcaacagcatatcgcgtgcactacaacggcggaaaagtttattactcagcgcaaagataatgacttccgccaccacgcccaggctccacaaataccccaccgcgctggcgctgtagccagctgcctgccagtaaatggcgctaaaaccgtaataggccgcatgtgccccctgcaataaacaaacgcaggccagaaagcgccagttctggcgaaccagcgccaaccacgcagaccaaccggtgctctcctgctggcgacttgccccttgtggctgaatcgtcggacggatgagaaagccgagcagcatggatgccacgcccaacgtcaacagcgcgaggatcacccgataatcaaacatagtgaccagtttgcccgtcagcgcgctgccaatgacaaacgccacgctgccccacagtcgcactttgccgtaatcaagcgggaactgcttttgccacgtattcgccagtgcatcggtcaacggtaccagtggactgaaaaagaggttaaagccaatcatcaccagcatcagccacgctacgtgcgcccccgcccagaaggcgacagcaaagagaagtgtcagcagtgccagcacgcgcaaggcggaaatcaggcgggaaggatcgctgacgcggggcgcgatgagcaaactcccgaggaaacgggcaaccagacctgcccccaataacaggccgatggtttctggcgttaaaccaatccctttaagccagacgctccagaaaggtagaaaaatgccgtaactaaaaaagtatgtgaaatagccgagcgccaaccagcgcgtggattgcaaaaccatgagtccctcccgtcaggaggcgttagtctggggttaatcgaatgttggtgcaagttgaaaaataagaatattcgagcctgcttcccgatgtctgtaacgccagttcacaagcactaaaaaactgagatccgcgacgcatgttgcaaaaataatgcgtaattatgccgttacgcttgccaaacgttcctgcacaatggcgatgaaatcgcgtaatgccggcttcatctcccctttcttccacgccatcagtaaagcaatggaaggcacatttccggcaatgggacgaaaaacaacctgtccggtattaaaattattcatataaccgggtatcaaagtgacgcccagccccatgcccaccagattcatggtcaccagaatattcgttgccacctggacgatatttggctggctgttttcttgcgcaaaccacgctttaacgatcggcgcaaggctaccggaatacaccggatcggtactgacgaaattcacgccatccagttgcgcggcggtgatctctttttcatgtgctaaagggtgatcaaccggtaacacaaccactaatggttcgtcaaaaagctccagataatcaatctccgggctataaacaggatggcgcattaagccgacgtcgagttcaccacggcgaattttttcctcctgttgcgtggtgattaaactcaccagctcaatcaaggtgtctggctgtctgagacgaaacatcggtaatacttttggcagtaaattcacttccgcgcttggcacaaagccaatggttaattgtctgtcttcctgaacaattttccgcgcccgtaatttggcattttccgcttgttcgaggattgccagcgcgtcctggagaaaacattctcccgccgccgtcaacgcgactttgcgcttatccctcaccagtaacggaacaccgacacagttttcaagatcgcggatctggctgcttaagctaggctgactggtatgcagtttttccgccgcacgggtaaagttcagtgcctgcgccactgcgacgaaatagcgtaaatgccgtagttccatcaccttccccttgttatcgaaaaaacgtctcagctggtagaaattaactatttcacatattagcaaccaaccagcaacatccttatggcacaaaaatagaaggtcaatacatcttatctttcaggattaaaaaatatgaccacacccagtgatttgaacatttaccaactgattgacacccaaaatggtcgggtcactccgcgtatttataccgacccggatatttaccaactggagcttgagcgtattttcggtcgttgctggctatttctcgcccacgaaagccagatcccaaaacccggtgatttctttaacacctacatgggagaagatgcggttgtcgtagtgcgtcagaaagacggcagcatcaaggcgtttctcaaccaatgccgccaccgggccatgcgtgtgagttatgcagattgcggcaacactcgcgcctttacctgcccgtatcacggctggtcttatggcattaacggcgagttgatcgatgtaccgctggaacctcgcgcctacccacaagggttgtgtaaatcccactggggactaaacgaagttccttgtgtggagagttataaagggctaatttttggcaactgggataccagcgcaccgggcctgcgtgattacctgggtgacattgcctggtatctggatggcatgctggatcgtcgcgaaggcggcaccgaaattgtcggcggcgtacaaaagtgggtgatcaactgtaactggaaattcccggcagagcagttcgccagtgaccagtatcatgctctgttcagccatgcttctgccgttcaggtattaggggcgaaagatgatggcagcgataagcgcctcggtgatggacaaaccgcccgcccggtgtgggaaaccgccaaagatgcgctgcaatttggtcaggacggtcacggtagcggtttcttctttactgaaaaaccggatgctaatgtctgggtcgatggcgcagttagtagctattaccgcgaaacctatgccgaagcagaacaacgtttaggtgaagttcgcgccctgcgcctggcgggtcataacaatattttccccacgcttagttggctaaacggcactgccacactccgcgtctggcatccgcgcggccctgatcaagttgaagtgtgggcgttctgtattactgacaaagccgcctccgatgaagttaaagccgcttttgaaaacagcgccactcgtgcttttggtcctgctggttttctcgagcaggatgacagcgagaactggtgtgaaatccagaaattgcttaaaggccaccgcgcccgcaacagcaaactgtgtctggaaatggggcttggtcaggaaaagcgccgcgacgacggcattcctggcattactaactatatctttagtgaaactgccgctcgtggaatgtaccaacgctgggccgatcttctgagtagcgaaagctggcaggaagtgctcgataaaaccgccgcttaccagcaggaggtgatgaaatgagtgcgcaagttagtctagagttacatcaccgcattagccagtttctctttcacgaagccagcttactggacgactggaaatttcgtgactggctggcgcagctcgacgaagagattcgttacaccatgcgcaccacagttaacgcgcaaacacgcgaccgccgcaaaggcgtccagccaccgacaacctggatttttaatgacaccaaagaccagctggagcggcgaatcgcccgtctggaaacgggcatggcctgggcagaagagccgccgagtcgcacccgtcacttaatcagcaactgccagataagcgaaaccgacatcccaaacgtatttgctgtgcgggtaaattatctgctttatcgggcacaaaaagagcgcgatgaaacattctatgttggaacgcgtttcgacaaagttcgccgtctggaagatgacaactggcgcttgctggaacgggatatcgtcctggatcaagcggtaatcacttcccataacctgagtgtactgttctgatgaatcgaatttatgcgtgtcccgttgcggatgtgccggagggtgaggctctccggatcgataccagccccgtcatcgccctgttcaacgttggcggcgagttttatgccattaacgatcgttgcagccatggtaatgcgagtatgagtgaagggtatctggaagatgacgccacggtggagtgcccgctacacgccgccagtttttgcctgaaaacggggaaagcgttatgcctgcccgccaccgatccgctcaccacttatccagtacacgttgaaggtggtgacattttcatcgacttaccggaggcgcagccatgagcgatctgcataacgagtccatttttattaccggcggcggaagcggattagggctggcgctggtcgagcgatttatcgaagaaggcgcgcaggttgccacgctggaactgagcgcggcaaaagtcgccagtctgcgtcagcgatttggcgaacatattctggcggtggaaggtaacgtgacctgttatgccgattatcaacgcgcggtcgatcagatcctgactcgttccggcaagctggattgttttatcggcaatgcaggcatctgggatcacaatgccagtctggttaatactcccgcagagacgctcgaaaccggcttccacgagctgtttaacgtcaatgttctcggttacctgctgggcgcaaaagcctgcgctccggcgttaatcgccagtgaaggcagcatgattttcacactgagtaatgccgcctggtatcctggcggcggtggcccgctgtacaccgccagtaaacatgccgcaaccggacttattcgccaactggcttatgaactggcaccgaaagtgcgggtgaatggcgtcggcccgtgtggtatggccagcgacctgcgcggcccacaggcgctcgggcaaagtgaaaccagcataatgcagtctctgacgccggagaaaattgccgccattttaccgctgcaatttttcccgcaaccggcggattttacggggccgtatgtgatgttgacaagccggcgcaataatcgcgcattaagcggtgtgatgatcaacgctgatgcgggtttagcgattcgcggcattcgccacgtagcggctgggctggatctttaaggaagcacgatgaaagaaaaaacgatcattattgtcggtggcgggcaagcggcggcaatggctgcggccagcctacgccagcaagggttcaccggtgagctgcatctgttttccgatgagcgacatcttccttatgaacgacctccactcagcaaatccatgttgctggaagattccccgcagttacagcaggtgttacccgctaactggtggcaggaaaacaatgttcatctgcattccggtgtaaccatcaaaacgctgggtcgcgacacacgagagttagtgttaaccaacggcgaaagctggcactgggatcagctttttatagcaaccggcgcggcagctcgaccgctgccgttgcttgatgcactgggagaacgctgctttaccctacgccatgccggtgatgccgccagactgcgagaagttctgcagcccgaacggagtgtcgtgattatcggtgccggaactattggtctggaactggctgccagcgccacgcagcgcagatgtaaggtgacagtgattgaactggcggcaaccgtcatgggccgtaatgcaccaccgcccgtgcaacgctatcttttacagcgccaccagcaggctggtgtgcgcattctgctcaataatgccattgaacatgtggtcgatggtgaaaaagtagaactgacgctgcaaagtggggaaacgcttcaggctgatgtggtgatttacggtattggtatcagcgccaacgagcaactggctcgcgaggccaaccttgatactgccaatggcattgtcattgatgaggcttgccgcacctgcgatcccgcgatctttgccggtggcgatgtggcaatcactcgtcttgataatggtgcactacaccgctgcgaaagctgggaaaacgccaataaccaggcgcaaattgccgctgccgcaatgttagggctaccgctaccgctactgccgccgccgtggttctggagcgatcagtacagtgataacttacagtttattggcgatatgcgtggcgatgactggctttgtcgtggcaacccggaaactcagaaggcgatttggtttaatctgcaaaacggcgtgcttatcggtgcggtcacgctgaatcaggggcgtgagattcgcccaattcgcaaatggatccagagcggcaaaacgtttgatgcgaaactgctgatagatgagaacatcgcgcttaaaagtctgtaaccaggataattagcgaatatctcaatgcctggggcgtggcgaggtgcaagagtgtgtattacgtttaaaagtcattatcttgcaaagggattggttatgaacacactacgttattttgattttggagctgcccgccccgttttgttattaattgcccgtatcgccgtggtcttaattttcattatttttggttttcccaaaatgatgggctttgacggtacggtccaatatatggccagcttgggcgcgccaatgccgatgctggcagcgattattgcggtagttatggaagtgcccgccgcgatattaatcgtgcttggctttttcacccgtccgctggcggtgctgtttattttctacacgctgggtacggcggtgattggtcaccattactgggatatgaccggcgatgcggttgggccaaatatgattaatttctggaagaatgtcagtatcgctggcgcgttcttgctattggcaattaccgggccgggggcaatttctctcgatcggcgttaagaaagatgccggatgcggcgtgaacgccttatccggcatttaataaattacagccactctacccgcaagctcatctcactagttgtactttcccctggtgctagcgcaatgagatcacccccttccgggcgatgatgatcatccggcgcatggctcatcggttccagacagaagaaatcaaacgcatatcctttatcaaacgcagggtcggaaacaaagatgaaataacacggtgcaggtggcgtcgtttccatgatgatggcataaccttcctgcggctgctcgatgcgggcctgaccattccatccggcaaaaccattgttcacccactggcgcggcaacggcgcgggctggttaaaatccagttcctgcggtagctgctcgcaaaactcacccgccagccactgctcccgctccagccagtaaccgctcgcctgtgcctgaatccgcgtttgcgggctcaacggaaaataaggatgccagccggtaccaaatggcagcgtctctgccccttgattggtgacagagagcgtcaccgtcagcgtatccgccgttaaatgaaacgcctgacttacccgatagtgatagacaccgctgcgatgttcatacaccagacacaaactatcatcgctgtggctgacacattgccactcgcccagccagccatcgccgtgtagatagtgcgcatcccactcaacattcggttgcagttgatactcacgcccctgccagacaaaacgattgccgctcacccggtttgcaaatggcaccagcggaaaacaactggcatcggttgccacaccgctttttttaccaggacgtaagagcggcgtcgtatcgcgccagaagccttcgattacgccgccctggtcagaaacgtccagctttaggctcccgtgggataaggtatagatggtcatccgctaactccttaatccgggaagttaatcacaactttcccgcatttgccgctcgccatcagcgcataggcatcacctgcctgttccaggctgaagcgatgggtaatggcgttacgcggccacagcttccagtccgtcagatcatgggcgcatttttccatatggaacagactggtcacccaggagccgataatccgccgttgatggtgcatcagatcggcgctgacctcgaattccacttttccggtttcaccaatgtaaaccacccgtccccagtcagcggtggattgcagtgccagcaagcgacctgcggcattaccggaacaatcgagcgcaacatccgcgccaccgtgggtgagttcggcgataatctgcggcagaccttcggtggttgctaaatagccgtgatccatcacccctaactgttttgccatcgccagacgttccggcagcatatcaacgccgatgatccgttttgcaccgcgacctttcgccagcatcatcgccatcatgccgactggccccagaccgaccaccagcacgttatcactgccggaaacttcgccgcgcaaaattccttcatacgctgtaccaacgccgcaactgataaacgcaccatcttcgtagctcagcgcatccggcaggaggatcagatctttttcttccgccagcaagtattcggcatgaccgccgtcacgctgccagccgtaagccgcttttccttcgccagtacaagaaataggaaaaccgcgacggcagttcgggcaaaaaccacagccagaaatgtgatacaccagcacgcggtcgccctctttaaaatggcggcagccttgccccatcgccacaatctgcccgcacggttcatgaccgttgataaagccctggtataacggtttatcgggtgccgccgctgtggcacggtgttgatgatagatatagtggacatcgcttccgcaaatcccggaggatttcattttgatcagtacctggttaatccccggcgtcggcaccgcaacttcccgcagatcgacggtgctatttcctggtaaataagctgccagcatcgttttcataaatccctcattaacaatacgattaattttcatccctgccgcacccgcgccaggggcgttaaggtttagcgtttcgctttactgcttcgctgggtcagcaagatattcgccagcaccgccaccacgatgatgacgccgcgtaccacctgctggaaaaaggagttaataccgagcagcaccagaccgttaccgattagcgtaatcaccagcacaccaagcaatgtaccgaacagggaaccgcgaccgccggaaagtgccgtaccgccgaccacgaccgcggcgatgacgtcaaactccagaccgtttgcggcacctgcgttaccagaaccgaggcgcgccgccaacaaaatgccggtcaccgccgctaataatccgctaagggtaaagataagaatgcgcacccgacgaacgttgatgccgcacaactgcgccgccgtagcattaccgccaacggcaaaaacgctgcgcccgaaggcggttttgcggctgatgaacacaaacagcgcaaacaacacaatcatgatcagcgcggataccggcacaccgagaaattgtccgcccagccagtccagcacctcgttttcatcaatcggcactggcagtgcgttcgtcataaacagccccattccgcgcagggcgctccacagccccagtgtggcaacgaaacttggtacattaaacacgccgcgcagcaccccggccagcgttcccatcagcgcgcctaacagcaacaccagcaggcacgccaccgccagcggaacttcaaattgcagcaaaaatgccaggcacacgctgacaaaagccaccatcggcccaacgctgacatcaatttcaccggagataataatcagcgtcatcgcccaggcggcaatcccaatggtggcggcatcgcgcagcacgttcatctggttattcaaactgataaagccaggcgcgttcagggagaagaccagataaagaatggcaatcaccaccagcaaaccgatctcattaatatggcgactgacaaattgtttgaggctgacgctcttgccctgcggcaatggtaaactgctagcagacatcttcaggttcctcggtaaaattcatcagtgcacagacagaatggcggacatcagctcatccacattgaccggagcgtgaaactcctggctgaacgtgccgtgctgtaataacaggatgcggtcacacaccagcggcaactcctccacttcactggagataaacaccacgctttttccttcggcagccagctcacggacaatacggtaaatctgctgtttggcttcgatatcgacgccgcgcgttggctcgtcgagcaacaaaatctggctggcagcatagacccaacgaccgatcaccactttttgctgattgccaccagaaagcgtgccgatgggtgtttcgctactggcggccttgaccgtcatccgctgcatcacctcttcggtcaggcggcggatggtggaccattgcagcacaccgttggcgctgattttttgccgattggtcagcactgtattttcgtcaacgcccaaccagggaatgatccccgcttctttgcggttttctggcgtatagccaatgccgcgtttcagcatgtcgccgtaatcggggcgcgtgattttctcgccgttgataacaatttcgccctgttcatactcctccagcccaacaatcgccttcagcaattcactgcgccctgcccccagcagaccagcaatgccgagcacttcgccacgacgtagcgtaaaactgatatcctccagcttgggcttatggcgtaacgcacggacttccagcacggcctgatccacaatttcctgaggggctaccggcgcaatatcaacgtgatcgcgcccgagcatcaggctcacaatatgatgcgtggaggtgttttcgagcatcacatcgcccgccacctgaccatcgcgcataacggtggcacaggaggcaatgcggcgaatttcttccatccggtggctgacataaatcaccgccacgcccagtgcgctcatctttttcaccgcgctgatcaccagttcaacttccgcactcgcaaggctactggtaggttcatcaagaatgaccacgcgcggctcgcccttcatcacccgcgcaatttccaccagctgcttttgcgccgggcttagcgtactaacaagttgttcaggactaacgtcaacgcccagcgcctgtaagcaacgttgggcatcctgcgccatttgcaggtaatcaatcatgccgttgcggcggggccactgaccgaggcagaggttttccgccactgtcagcccttccaccagacttaactcctgataaaccgcgcgcacccccagttcagcggcacggcgagtcagcgtagcttcgtcaccttccagtcgcgtctcgccaatccagatatcaccgctatccgggcgttcgctgccggtaagcattcgaatgagagtgcttttgcccgcgccgtttttacctaacagcgcacgaacttcgcctttattgagcgtgaagttaacgttatccagcgcaacgacgccgggataacgcttatttcctgccaccacttttgctaccgggactgcctctgttgccgtgaacatagggacctctgcgaatcagcgattagggcagaccatcaacgtgcgttgccagccactgtttaccgtcttccgttttggtatagagatcgataggcacctgaatcactttttcaccgtcggcttgtttattgataaccttcaatgtttgcgcgaaaacagcattgcccattttcttaccggaaatatccactaccgctttcagcacctgattgttttccagctcctgagcaatttcggttgtcatatcgctaccgaaaacagcaatttttccggcctgattttgattacgtaccgcttttaccgcgccgagtgtcgcaccgccgctttcccccataatggcgttgagatccggcgtggagataattagtttttcaccaacggaaatcgctttatctaaaacagtcccttcctgattagcgacaatttgcgcgccgggaacgcgggattttaaaacttcttcaaatcctttacgtcgctgcacacaaacttcaaaggcttcgcaattgatgacggcaattttcggctggtcaattttattggcaataaaataatcagcggcagcgttacccagttttttaccaaattccagcggatcgccgaccagatacgcgctgacatatttatcgacccccttttgattaatacaggtgttgtagcaaatcaccggaatgcccgcttcactggcgcgacgaacggtacggctactgccattttcagacactgcgcttaaaataatggcatcgacattacgcgccacgagggtatcaacaaaggtactttctttgctaatatcaccctgggcgttagtttctattaactgaacttgtacactggaatcttttgccgcatcctgaacgccctgacgcactccagcgtagtatccctgagtatcaaggtatattgcgccaatggtcatttctttttccgcagccctggcaaatagtgcgctacctaatagcgtagccattaataatagattacgggttgttctcatttttgtaggcatagagcctcctgtagggtttttattaacaacggcttattctaattattttgtgatgagcggcagcgcgtgccgctcaaatattacagttaatagggtttagtgaacgcggttaaaaataaaaggcatcacggtggtgaataatgccgctttcggccaagccggattaatcgccgtcaattcagcgcgagcagactcatattgcgcaacctccccgagtcccgcggacgccagcatcgccaccatcaggcatttttctttatgctgctgttgtaaatcgccatacaggctcaacaagtcaggttggctgacggcaaagaaatccgcttcgatactggttttcgccatctcttgcgcccactgtttcatttcactaaacagttgctgtgcggtttgttgttcgcccagcagtcgcagcgccatcccttgccagaagagataatcaaccggctgatcgttgtaataactgtgaatgttaatagtgcgatcgccggtcgccgccagacgtaaacaacgcgtcgcttcagtttcatcgccctgcgcgttggcgcatatcgcctgccagaaccagatgtcgttatcagtttgccccggtaaacggccttcgcttaaattctccggataatgcagcgcggcatgaagcagttcgcaggcctgctgcggctgtctggcatcaagatgctgccaggcgcgtaataactggttgaggataaactgactggtgaccttcccttccccgccttcccacgggtggaatttgcgcgtggcgagaatgtccgccgctttgtctgcctgacccgtgagatgccacaaattgagcagttctgcggtcatgtcgtcgcgtttcagcgcaatttccagattattttccagacgcgccagtcgtttctccggtgtggctccacttaacttatccagcaaatcccgttcgaaaagcagacgtgcatcctgcggcgcaagctgataagcattatcaagataacgcgcggccagctcataatcgtgttgcttattccacgcatggatcgctaacccgcgccagccgtcggcaaactccgggctcatctctacgcaacgttgccaaaaggcaatggctttgttgtagctacgtttgttgtagtagaagcaagctagtaaatggcgagcaaaccagcactcttcaatactctccagcgccgccacttcttccagcgtattcgggaaacggacaaactgcgggaagacatcaatggcttttgcgaccagttcgccacgttcggctttcggcagcaagctggcttgcaggtaaagcggcagcgtgcgctggcagtccagtgcgttcagcatctctgccgccagggtgggcattccccagttaatcagttgcccggcggtcatcagggcgttaacgtcgcgtccctgacacagaccgcgccactgcgcgagagcactttcgctacgaccatcgaaccagttcagccaccacagagtggcgttcagcggataatcgcgcagcagtttctcgcgctgcacacgcgcgttgtcctgacgaccacttaacaccagcagcagattatgcaggcaaagcacttcctgattggttgggcaggcgcgaagactttgttggcaaaaatccagaccagcgtcgaagttaccattacgcgccgccagtcgtgccaggccataatagccaccggctttgctgttgccgctccagaccgcacgccagaaatcctcttcggcttgttgatattgtccctgacgttcgtaagcactggcgcgaatcaaactcgcctgtccgcactgcggatttttgttcagcgcatgtgcgcgtttcagagcctgagtggcatacgccaccgcttgcgggaaatctgcgcggttatattccagcatcgccagcgccaggttacagcgataatccagcgggtccagcgccacgccgcgcaggtagtaatcgaacggactacggctggcgtgatgatattgctccagatgctgaccgataaaccaggcttcatctgtactggtaatgtcttgtgctgccagtggcgctttggcgacgtccggtaacggcaacgcttgcggctgatgttcctgataactcagtacaatattgccgtcggcatcggagagctcaatggtcagcctttcaggattgataccgtgcaacacgccctggatggcggtcgcaggcatcagtgccacggcatcatcaagtaacgcgttgcatttaccgatttcgcggatcgccaggcggtatccgttcaacggagagatggcatacagcccccactcaatcccccgcttactacgctggagttttatcaccgcatcgcgggaggcattttgcaccatgcccaaagaatgataaggcaggaaatactgctcaaaacgcttctcttcgtaagcatcaagccaggtaaaatcgggctggttatcggcaaaaataccggtcatcagttcgatatacgggccgttattgtcggtcagactcttatcccacgcctggccaaattcactgtgtccccaactccactgttttttacctggcgcaatatggtggttggcaacgtgcagcaaaccgccatcttcatcgtgacaccacgcgccgacaaaatcgtactggcttttttcggccatataactggttggaacaggcacatttttatagcgagaaatgtccactccagcggagtagtccactttgtagtaagtgccggtagcgatggggaaagcggagacggcccgtttgccgtgatcaaacaccgccgttacatccggcgggaagacgctctgatgcccttccccccctttcactgccgggttggcccaccacaagaaatgacgcggcgtggcgttcccgttatagacgcggctggcgatttccagcgccgcccggtcagggcgcagggtgaaacctgtcatcacctgtaaaccatgcatcggctccgtttcgcctacccacaccgtctgtgcaccgtcttcatgggcttcgagggtgaaatcaacgggcataaaggtggtcgggcgatgatgttgcggccagttaaactcaatcccaccggaaatccacggccccagcagccccaccagcgcaggtttaatgacttcattgtgataaacaaaatcgcgctgtttcactttatcccacgcgcgatgcacccgaccgcccagttccggcaggatcatcactttgatgtagtcgttttccagccacaccgcctgccaggatttcagggttttctgctcgctcagcgtatcggtcacgccgtagggataaaccgcgccggagcttccctgataaacgcgattttccaggaacatgggatgtatatcctgcggcccggtttcataggtcgggatctcaacgcgctcttgccacacttttactggagtcatggtgccctcaatattaacaagacatactgaattaaaagatttgtggcagtgtattgaacaatctggcaatgttttcgcggaataatcacgcaattaactaaacaaggtttagtgaagatgagagcctgcattaataatcaacagattcgccaccataacaaatgcgtgattctggaactgctgtaccggcaaaagcgcgccaataaaagtacgctggcccggctggcgcaaattagcattccggcagtcagtaatattttgcaggaactggaaagcgaaaaacgggtggtgaatattgacgatgaaagccagacgcgcgggcatagtagcggtacatggctgattgcgccggaaggtgactggacgctgtgcctgaacgtgacgcccaccagtattgagtgtcaggttgctaatgcttgtttaagtccgaaaggtgaatttgagtatttacagattgatgcaccgacgccgcaggcgctgctgtccgaaatcgaaaaatgctggcatcgccaccgtaaattgtggccggaccataccatcaacctggcgttggcaatccacggtcaggttgatcctgtgaccggcgtgagccaaaccatgccgcaagcgccgtggacaacgccggtggaggtgaaatatctgctggaagagaagctcggcattcgggtgatggtcgataatgactgcgtgatgctggcgctggcggagaaatggcaaaataatagccaggaacgggatttctgcgtgatcaacgttgattacggcattggcagcagcttcgtgattaacgagcaaatttatcgcggcagtttgtatggtagcggacagattggtcacaccatcgttaatccggatggcgtcgtctgcgactgtggacgttatggctgcctggaaactgtcgccagcttaagcgcattaaaaaaacaggcgcgggtatggctaaaaagtcaaccggttagtactcaacttgatcctgaaaaactgactacagcgcagttaatcgctgcctggcaaagtggagaaccgtggatcaccagctgggttgatcgctctgccaatgccattggtttgagtctgtataacttcctcaacatcctcaatattaatcagatttggttgtacggtcgcagttgtgcctttggtgagaactggcttaatactattattcgccagacaggatttaacccgttcgaccgcgacgaaggaccgagcgtgaaagcgacgcaaattggctttgggcaattaagccgcgcacaacaggtgctgggaattggctatttgtatgttgaggcgcagttacgacagatttgatggcgcgataacgtagaaaggcttcccgaaggaagccttgatgatcataaacgaaaaattgcctgatgcgctacgcttatcaggcctacacggagattgcaatatattgaatttgcaaagttttgtaggccggataaggcgttcacgccgcatccggcatgaacaacgagcacattgacagcaaatcaccgtttcgcttatgcgtaaaccgggtaacgtgcgcagatgtcgagaactttacctttgatgcgctcgataacggcttcatcattgatgctgtccagcacgtcacacatccagccagccagttctttcgcttcggcttctttaaagccgcgacgggtaatcgccggagtacctacacgaataccggaggtcacaaacgggctcttcggatcgttcggtacgctgtttttgttgacggtgatgttagcacggcccagagcggcgtctgcttctttaccggtcaggtttttatcaaccagatcaaccaggaacaggtggttatcagtgccgccggaaaccactttgtagccgcgctcgaggaacacttctaccatcgctttagcgtttttagcgacctgctgctggtaagttttgaactcaggctccatcgcttctttcagagcaaccgctttaccggcgattacgtgcatcaacggaccgccctgaccaccagggaaaacggcagagttcagttttttgtacagctcttcgctaccacctttcgccaggatcaggccgccgcgcggacccgccagggttttgtgagtggtggtagtaacaacgtgagcatgaggaaccgggttcgggtagacgccagcagcaaccaggcccgcaacgtgcgccatatcaacgaacaggtaagcaccgatgctgtcagcgatttcacgcattttcgcccagtccaccacgccggaatatgcagagaaaccaccgataatcattttcggcttgtgttctttggcttgtttttccagatcggcgtagtcgatatgaccggtagcatcgataccgtaaggaacgatgttgtacagtttaccggagaagttaaccggagaaccgtgagtcaggtgaccgccatgcgccaggttcatacccagaacggtatcacctggttccagcagcgcggtgtagaccgcaaagttagcctgggagccggagtgcggctggacgttagcgtagtcagcgccgaacagttctttcgcacgatcgatcgccagttgttcaacgatatcaacatactcgcaaccgccgtagtagcgtttgcccggataaccttcagcatatttgttggtcagctgagaaccctgcgcctgcattacgcgcgggctggtgtagttttcggaggcgatcagttcgatgtgctcttcctgacgtactttttcctgctccatagcctgccacagttcggcatcataatcggcaatgttcatttcacgctttaacatccgcatctcctgactcagctaacaataaaatttttggcctttataggcggtcctgttggacaacggcgaacagtataaccgaatcattgtgcgataacaggtcttgacaaaggaatttacgcaaacgattaccttcaggctacgcaaggctttggagaataaagagcttgcaaccggaaacggatttcttttcaggtttgtgatgcaaatttttcacttcatcacattctttctgaaaaacaccaaagaaccatttacattgcagggctattttttataagatgcatttgagatacatcaattaagatgcaaaaaaaggaagaccatatgcttgacgctcaaaccatcgctacagtaaaagccaccatccctttactggtggaaacggggccaaagttaaccgcccatttctacgaccgtatgtttactcataacccagaactcaaagaaatttttaacatgagtaaccagcgtaatggcgatcaacgtgaagccctgtttaacgctattgccgcctacgccagtaatattgaaaacctgcctgcgctgctgccagcggtagaaaaaatcgcgcagaagcacaccagcttccagatcaaaccggaacagtacaacatcgtcggtgaacacctgttggcaacgctggacgaaatgttcagcccggggcaggaagtgctggacgcgtggggtaaagcctatggtgtactggctaatgtatttatcaatcgcgaggcggaaatctataacgaaaacgccagcaaagccggtggttgggaaggtactcgcgatttccgcattgtggctaaaacaccgcgcagcgcgcttatcaccagcttcgaactggagccggtcgacggtggcgcagtggcagaataccgtccggggcaatatctcggcgtctggctgaagccggaaggtttcccacatcaggaaattcgtcagtactctttgactcgcaaaccggatggcaaaggctatcgtattgcggtgaaacgcgaagagggtgggcaggtatccaactggttgcacaatcacgccaatgttggcgatgtcgtgaaactggtcgctccggcaggtgatttctttatggctgtcgcagatgacacaccagtgacgttaatctctgccggtgttggtcaaacgccaatgctggcaatgctcgacacgctggcaaaagcaggccacacagcacaagtgaactggttccatgcggcagaaaatggcgatgttcacgcctttgccgatgaagttaaggaactggggcagagtctgccgcgctttaccgcgcacacctggtatcgtcagccgagcgaagccgatcgcgctaaaggtcagtttgatagcgaaggtctgatggatttgagcaaactggaaggtgcgttcagcgatccgacaatgcagttctatctctgcggcccggttggcttcatgcagtttaccgcgaaacagttagtggatctgggcgtgaagcaggaaaacattcattacgaatgctttggcccgcataaggtgctgtaatttgatgttgccggatggaaacatccggcaacccttgacgcggtttaaattgccgcgtcgtcctcttcaccggtacggatgcgaatgacccgtgccacgtcaaagacgaagattttaccgtcaccgattttgccggtttgcgccgtgcgaataatggtatcgacacaggtatcgacaatgtcgtccggtacgacaatctcaattttcactttcggcagaaaatccaccatatactccgcgccgcggtacagctcggtatggcctttctggcgaccaaagcctttcacttcggtcaccgtcatgccggtaataccgacttcggccagtgcttcgcggacatcgtccagcttgaagggttttataatcgcatcaatctttttcatgctattccttgaaaaggtcgcctgtcttttgatctgctaaacgtaacacataacgccaattcattccttgaaatcgtttgcatccagctcgtgtcgggaaagcagtttataaaattctgtccggttgcgccccgccattctcgccgcgtgggtgacgttgcctttggtgatttgcagcagcttacgcaaatagttgagttcaaactgattacgtgcctcaacaaaggttggcagcgccgtattttcaccctccagcgcctgctccaccagcgcatcactaatcaccggagaactggtcagcgccacgcactgttcaatcacgttgaccaactggcgcacattacccggccagctcgcggtcatcaggcgtttcatcgcatcggtagagaacgcgcggacaaacggtttatgtcgctctgccgcctggcgcaacaggtgatttgccagtagcggaatgtcttctgtgcgctccgccagtgccggaattttcaggctgacaacgttgaggcggtaatagagatcttcgcggaattccccgcgcgccatcgcttttggcagatcacggtgagtggcagaaataatccgcacattgatatcaatatcgcggttactgcccagcgggcgcactttacgctcctgcaacacgcgcagcagtttgacctgtaacggcgcaggcatatcgccaatttcatcgagaaatagcgttccgccttccgccgcctggaataaaccttcgcgattgctgacagcgccagtaaacgcgccacgcgcatgaccaaacagctcgctctccagcaattgctcgggcaatgcgccacagttaatagcaataaatggtttgctgttgcgcgggctggcgttgtggatagcctgggcgaaaatctctttcccggtgccgctctgaccgttaatcaaaacgctgacgtcactttgcgccaccagccgcgcctgttccagcaaacgcagcatcagcgggctgcgggtgacaattgcctcgcgccagcgttcatcggtggctggcgcggattgctccagcgcatcgtcaattgcctgatatagcgcgtctttgtcgacaggcttggtgaggaaactaaaaacgccctgctgtgttgcagcaacggcatcgggaatagaaccatgcgcggtaagaataattaccggcattcccggctgcactttctggatttcagcaaacagctgcataccgtccatttcatccatccgcaggtcgctgatgactaaatctactttttcgcgattcagtacccgtaatccttcagcgccactttccgccgtgaccacactgtagccttcgctggtcaggcgcaggccaagcagtttcagcaatcccggatcgtcatcgaccaataataaatgcgcaggtttatggctcatcaggagtgacctcatgggtggatggcgcgggcttttcactctcgtgcggcgtatccgggctgaaatttccagccggtttgcgggtgctgagctggcgttcaatatcggtcaggttttccagcttgcgggtggtgagttccagttgctgctgtagaacgtgatgttgctggcgcaatgtatccagctcgctgtcgctggactgctggagtttactgtaacgttggcgctcttccgccagttgcagttgcagcgcctgaccatcgcgccagagttgatacagtgggcgaacctgtgccgggatctcggtacttaacgcttcaatacgcgcgaccagctggcggcgctcatacggcgtaattttggcgtcggcgagcaaaatcccttgtttaaaggtattttgccagctgccgtcgtcatattggcgagcttgctgacggctctgcgcaggcattaaacgatcagcacaatccatcgcccgcagccagtaaagcggattggtttcggtacttttaccttgcagcgcccagatgtcgctacattcagtagaaagatagtcagccagttgataaaccggaattttttcttctgctggcgtatcaatggctggcttattgtgattctgcacgcaacccagcaatgccagacatggcagccctgccagccacagccgtcggggcaataatcgttgaaaaatgtgtcgcatattcaccagacttaaagcctatcccagtgggcgtaattgttgcagacagtctggacatggacagcgcggagaaaccggagcgtacatatcgtacgtgaagatttcgagcactgcccggggccgaactgacaaataaaatagcctgataggataggctgttagcattatttcgtgtttttgctgctcggtaattcaatgcggaaacaaacgtcttgcccgctctcgtcgaccagatacagttccccttgcatacggcgaatacaatccctggcaatgcttaatcccagaccgctgcccttcaccgccccttttcgctggtggcttccctgaaaaaagggttcgaagatcatggcgcgttcctcttgcggaatgggcgtgcctgtattgatgacatcaatataaacccgcgcaccatgtaaactgctgcgaaggcaaatgttaccggattcagccccgtagtgcaccgcattggagtaaagattatccagtacgctcatcagcagcattggctccgccaggcaagctgttgctttgagatcgacgtcggtatgcatcattttagcccgtgcgggcaggctatgagcagaaaccactgtctccaccagcggtgctaactcaacattctccagttccaccgcactgtccgcctgtttacggttgtaatcaagcagttgttcgatcagtttttgcaaattgcggctgctgctatcaagaatgctcaccacctctttttgctctggcgtaagcggcccgacaacctggtcagccagtaattcagtgccctcgcgcatactcgccagtggcgtttttaattcatgagataaatgtcttaaaaattgatggcgttgggattccagccaactcaggcgctcacttaaccaaagaatacgttgcccaacgctgcgtaactcgctcggtccactgaagctgacgctattgcccagagaacgcccttcccccagacggttgatcatgcgctcgatatttttcaccggcccgataatcatccgcgtgaaaagcagtaccattaccagactcaccagaaatagcaccaggctttgccaaccaaaatattgcccacgttcggcgatttcacgctgaagctgctgcccacgagagaacaccactgtgcgcgtggcctgtaccatttcggtattggcactggcaaaggcttcaagacgtgcggcggcggcagcatcgggaccgctgttgttacactgaagttgagccagattgtgcaaatcctgacgtaatgcctggtagagtttatcgtccggcagcacgcctgcgtgggcatcgagcatttcgctgtaacgcttgcgctggctttgataaaccttcgccagggttgggtcgtccagcacgcaatactgacggtaactacgctccatctccagcgccgcgttggtcatcgcttcactgcgccgggcatcaataagcgtagtgcggttaaccagcgccgcctgatcgctaagcgcattcaggctttgccaggcttgccatgccagcaccaacaggggcagcagaatcagcaaaaatgccagcattaccagttgtcgtaaactgcggggaaaaacgggccagcgtttcaaggtgttactctcgtcagacgcgaatagcctgatgctaaccgaggggaagttcagatacaacaaagccgggaattacccggctttgttatggaataaggcggtgcctaactcgacgtttcgcccgatggttgatatagctacgctgatatcagaagttggacggcaggcaccttgttgtgcgtcattcgtattttatgtagcacgtcccgaaggggctgacataagtcggtgaatgagccactggttactattatgcagtaactgtgccaataaagaaaatagtttggtaacgtactgattatacgttgctttgaggggtttatgtctcctccgctgtttgaatgtaaatcagccactgtgtcgctaaaaagagacaacttaagataaacttattagataatattaaaatcaatgagttaagtgtcgccagaaagcgacacggcaaaccacccattgtcgtgatttacagacacaaaaaagctcccggagttgggagcttatgatagtggttggtgcttaatgccgcatccgggctgcaaaaccaatgggctgacgacttaccccaactgcttacgcgcattgcggaaaatgcgcatccatgggccatcctcgccccagttttccggatgccaggagttgctgacagtacggaaaacacgttccgggtgcggcatcataatggtgactcgaccactttcagtcgtgactgccgtaataccgttcggactaccgttcgggttagccgggtaggtttcagtgactttgccgaagttatcgacatagcgcagtgccaccagccctttgctttccagtgccgccagatgcgccgcatcacgcacttccacgcgcccttcaccatgagagacagcaatcggcatttggctgcccaccatcccctgcaacagcagagacgggctttgggttacttcaaccaggctgaaacgcgcttcaaagcgatcggaggtattgcgcacaaaacgtggccacaactcactacctgggatcagttcacgcagattagacatcatctggcaaccgttacatacccccagcgccagcgtttgcggacggtggaagaaggttgcaaactcatcgcgtacacggtcattgaacaggatactcttcgcccaaccttcaccggcacccagcacatcaccgtaggagaaaccaccgcacgcgaccagggcgtggaaatcttccaggcccgtgcgtccggtcagcaggtcactcatatgcacgtcgatagcatcaaagcctgcacggtggaaagctgccgccatttcaacatggctgttcacgccctgctcacgcagtacggcaactttcggacgtgcgccagtggcaatatacggtgctgccacatcttcgttgatatcgaagctcagttttacattcaggcccggatcggcgtcgttagatttcgcctgatgctcctgatcggcacactccgggttgtcacgcaggcgctgcatctgccaggtagtttctgcccaccagacacgcaacgtggtgcggctttcgctgaatacagtctgcccgttggcggtaatcacaaaacggtcaccggaaaccgcctgccctacataatggacacaatcagcaagcccatgctgtgccagtacggactcgaccgcttcacggtcagcggcacgaacctgaatcaccgcacccagttcttcgttaaacaacgccgccaggcgatcgtcacccagagtggcgatatccgcgtcaatgccacaatgaccagcaaaggccatttccgccagcgttaccagcaggccgccatcagagcggtcgtgatacgccagcagcttacgctgtgcaaccagcgcctgaatcgcgtcatagaagcctttcagttgcgcgacatcgcgtacatctgccggtttgtcgccaagctgacgataaacctgcgccagcgccgttgcgcccagcgcgttattgcctttgcccaaatcaatcagcagcagtgcgttatcttcggtagaaagctgcggcgtgatggtgtgacgtacatcttccacgcgggcaaatgcagaaatcaccaggctcagcgggctcgtcatttcgcgctcttcgttaccttcctgccagcgggttttcatgctcatggagtctttacccaccgggatcgtcaggcccagcgccggacaaagctcttcgcccacggctttaacggcttcatacaggcccgcatcttcaccagggtggcctgccgccgccatccagttggcggaaagtttgatgcgtttgatatcgccaatttgtgttgcggcgatgttggttaacgcttcaccgaccgccagacgggcagaggcggcgaaatccagcagcgcaaccggcgcacgctcgccaatcgccatcgcttcaccgtagtagctgtcgaggctggcggtagtgaccgcgcagttagcgaccggcacctgccacggccccaccatctgatcgcgcgctaccatgccggttacgctgcggtcgccaatggtcaccaggaaggttttttccgccacagtcggcagatgcagcacacgtttcaccgcgtctgcaatggtgatcccttcacgggccagcgcgtcgcctttcgctttcagcgtttgtacatcgcgggtcatcttcggcgttttaccaagcaggacgtccagcggcagatcgatcggctgattatcaaaatgacgatcgtgcagagaaagatgcagttcttcggtcgcttcaccaatcaccgcgtagggtgcgcgctcacgcttacacagttcgtcaaacagcggtaattgatcggcagcaaccgccagcacgtagcgttcctgggattcgttacaccagatttccagcgggctcatgcccggttcgtcgcttagaatctcgcgcagttcaaatttaccgccgcgcccgccgtcgctcaccagttccggcatggcgttagaaagaccgccagcgccaacgtcgtggataaacaggattgggttggcatcaccaagctgccagcaacggtcgatcacttcctggcagcgacgctccatctccgggttgtcgcgctgtacggaagcaaagtcgaggtcggcatcagactgaccagacgccatagaagacgctgcaccaccgccaagaccgatgttcattgccgggccgccgagaacgaccagcttcgcaccgacgttgatctcgcctttttgtacgtgatcggcgcgaatgttgccgatcccgcccgccagcatgatcggtttgtgataaccgcgcagctcttcgccgttgtggctgttcactttttcttcataagtacggaagtagccgttcagtgccggacgaccaaattcgttgttaaacgccgcgccgcccagcgggccttcggtcatgatgtccagcgcggtgacaatgcgctcaggcttaccgaaatcttcttcccacggctgttcgaagccaggaattcgcaggttggaaacggagaaaccaaccagacccgctttcggctttgcgccgcgcccggtggcaccttcatcgcggatttcaccgccggaaccggtcgccgcgcccggccacggagaaatcgccgtcgggtggttgtgagtttcgactttcatcagaatatgcgccggttcctgatggaaatcgtagcggcccgtttcgtggtcagcaaagtagcggcccacttcagaaccttccattacggcggcgttatctttataagcagagagaacgtgatctggcgtggtttcgaaagtatttttgatcatcttgaacaggcttttcggctgctgttcaccatcgataacccagtcggcgttaaaaattttgtggcggcagtgctcggagttcgcctgggcaaacatatacagttcgatgtcgttcgggttacgaccaagctttgtgaaagcatcctgcagatagtcaatttcatcttccgccagagccaagccaagacgcaggttagcgtcgatcagcgcctgacggccctgccccagcaaatcaacgctggtaaccggagtcggttgatggtgggcaaacaactgctctgcatcatctaaagcaaaaaagaccgtttccatcatgcggtcgtgcagttcagcggtaacctgctgccattgttcattggtcagcgtaccggcttctatatagtaagcaacgccgcgctcaaggcggtttacctgttgtagcccgcagttatgggcaatatcggtcgctttgctagaccagggagagatggtgccaggacgcggggtcaccagcaggagtttgccttgcggggcgtggctggcgagtgccgggccatatttcagcaggcgttcaagttgtgcgtgctcatcatcgtttaacggcgcattgaggtcagcaaaatggacatactcggcgtaaatattgtgaaccgggagcctggcagcctgaaaacgtgccagcagtttgttgattcggaatgcgctcagtgcagggctaccacgcagaatttccatcataagtctctcgtcttctaagctttcggtgtacccaagggggggaaacgggcgtcattataaagaatctgatgcgctgacgaaaccgtttgcgtggaaataaaatcaccatcgtgaattagcaacgcgtgccgccaatggctgtaataagttgccatctggcgcaggtttacgcaaaatgccgctcatttatgagtaaacctttcactattattacgttttttcaagctgggacgcgcacgacacagagaattaactaattgaaaaaattaaagattaattatctgttcatcggcattctggcactgctgctcgcggtcgctctctggccatccattccctggtttggtaaagccgacaaccgtatcgccgccattcaagcgcggggagagttgcgtgtgagcaccattcatactcccctgacttataacgaaatcaacgggaaaccttttggcctggattacgaactggcgaaacagtttgccgattacctcggcgtaaaactgaaagtgaccgtgcggcagaatatcagccagctgtttgacgaccttgataatggtaacgccgacctgctggcggcaggacttgtctataacagtgagcgggtaaaaaattatcagcctggccctacctattattccgtgagtcaacaactggtttataaagtgggtcagtatcgcccacgtacgctgggcaacctgacggcggagcaactcaccgttgcaccgggtcatgtggtggttaacgatctccagaccctgaaagaaacaaaattcccggaattaagctggaaggtagacgacaaaaaaggctctgcggaattaatggaagatgtcatcgaaggaaaactcgattacaccattgctgattctgtcgccatcagcctgtttcagcgcgttcacccggagctcgccgtagcgctcgatatcaccgatgaacaaccggtgacttggtttagcccgttagatggcgataataccctttccgccgccctgctcgacttcttcaacgaaatgaatgaagacggtacgctggcacgcattgaagagaaatacctggggcatggcgatgattttgattacgtcgatacgcgcacatttttacgcgccgtcgatgcggtactgccgcagttaaagcccctgtttgagaaatacgccgaagaaattgactggcgtttgctggccgctattgcttatcaggaaagccactgggatgcacaggccactagtccgacgggtgtgcgcggcatgatgatgttaaccaaaaataccgcgcaaagcctcggcattacggatcgtaccgatgccgaacagagcatcagcggtggcgtgcgttatttgcaggatatgatgagtaaagtgccggaaagtgtgccggagaacgagcggatctggtttgccctcgctgcgtacaatatgggctatgcgcatatgctggatgcccgcgccctgacggcaaaaaccaaagggaatcctgacagttgggctgacgcaaaacagcgtctgcctttacttagccagaaaccctattacagcaagctgacttacggctacgctcgtggacatgaagcctacgcttatgtcgaaaatattcgtaagtatcagattagcctggtgggttatctgcaagagaaagagaagcaggctacagaagcggcgatgcaactggcgcaggattatccggcggtaagccctacggagttgggcaaagagaaatttccttttctcagctttctttcccagagcagtagtaactatttgacccattctccctctctgctgttttccaggaaagggagtgaagagaaacaaaattaatccgtgctggattgcgcttttttctgcgctttaatttcctggcggcgcatgcgaaagaagtcactgagcaacgccgcgcactcatccgccagtattccttccgtaatttccactcggtgattcatacccggatgatgcagcacatccattaaagatcccgcagcgccagttttcgcgtcacgcgcaccaaagaccacgcgaccaatgcgactgtggatcatcgctccggcacacattacacatggttcaagcgtgacatacaacgtggcgtcgatcagacgataattttgcatcaccagaccaccctgccgcagggccatgatttctgcatgtgcggtgggatcatggcgaccaatcgggcggttccagccttcgccgattacccgattgttatgcactaataccgcgccgaccggcacttcccgctcatcccaggcacgtttcgccagcgtcagcgcgtgacgcatccagtattcgtggctaaattcgacttcagacaaaaagaaaactccggttataaaagcgcggcgcattatacacggacgctatgctttactttattccagttgctggagttcaccgcgcggggttactcgccaacgatgctgacagaaataaagcagcggattgtcctgattactgtcgctatagccactgtacagccgcagcggagtgccgattttgcgctccagttgtgcgaccttttcatgtcccagacaacgcatcgtcaatacccaaccaccatagccacgctgaatttggctggcgataagattaacccgcggcagccagggcgtatcgaaataaaccgcttcaaccagcggctgcggagagccggtaatcaaccagatatcagcatcggaacttaacaggtaggtggttaatcgctcctgaaccagcggaaaggcggtaacattgtcgcgaaaccagcgcacgaaatcggcctgcaacgtctgtaaacgtgcttcgctgtgaccaaaagtgcacccccacagaagcagactcatcggccagcgtgccgcacgaccttttatcaataacgcaatggctataatcggtaacaacggcaggacaagtaacgcattcagcggttggcgacgtagtaaatagcgcagaaaactgccgaacatatcctgctgatgcaatgttccatctaagtcaaaaaacaccacacgacgctcgtgagttgccaaaccatattcctctggactgaaacatcctgattaattttcgctactacatagcctaacagatagatcatcacttttccggcaacaatcgaccgcatcatggctaactggaatttttaattcatggcaattagcggcaatggaatataaaattcactcgcgtgtgtctcatattgcctgttgtcgccactatttcatcgcgaggaaagatatgaacggcttacttcgtatccgtcagcgttaccaggggcttgcccagagtgataaaaaactggcggattatctgctgctacaacctgatacggcgcgccatttaagctctcagcaactggccaacgaagccggagtcagtcagtccagcgtcgtgaagttcgcgcaaaaactcggctataaaggttttccggcgcttaagttggcgttgagtgaagcgctggcaagccagccggaaagtccctccgtgcccattcataaccaaatccgcggtgatgatccgttacggctggtcggcgaaaaactgattaaagaaaatactgccgctatgtacgcaacgctaaacgttaatagtgaagagaaactgcatgaatgcgtaacaatgttgcgctctgcgcggcggataattctgaccggtattggcgctagcggtctggtggcgcaaaactttgcctggaagctgatgaagattggcttcaatgctgccgcagtgcgcgatatgcatgcgctactcgcaacagtacaggcgagctcccctgacgatctgttattagccatttcctacaccggtgtacgacgcgagttaaacctggcggcagatgagatgctgcgagtgggcggaaaagtgctggcgattaccggctttactccgaatgccctgcaacagcgtgcttctcattgcctgtataccattgccgaagaacaagcgacaaacagtgctagtatctctgcttgtcacgctcagggaatgttaacggatttgctgttcattgcgctgattcagcaggatctggaactggcaccagaacgtattcgtcatagtgaagcgctggtgaaaaaactggtctgagtaaagaatgcgcgtataatgcccgcccggtttgtgttgttttgagagtttccttatggcgttgttaatcactaaaaaatgcatcaattgtgatatgtgtgaacccgaatgcccgaatgaggcgattagtatgggagatcatatctacgagattaacagcgataagtgtaccgaatgcgtagggcactacgagacaccaacctgccagaaggtgtgcccgatccccaatactattgtgaaagatccggcgcatgtcgagacagaagaacagttgtgggataaatttgtgctgatgcaccacgcggataaaatttaatattctactctggaagtagagtattaattatattactgggaagccttaacgccattatatttatttaattgatgacattagcataatcattcactaagttaatttatatagtatctgcccagacacttatttatagttattaaaggtgcgtccgactggttcaccggacgcaccttaagtacgtttccttgtgttataagaacagaaggatcagctgtaaaacagcaatgatgattttgatgacccgtttaatcaggtatcggcaatcagtcattcgtttttccttaaacaaggaatgcagccattcagattagcccttacatctccccaaaactgaacgtgcgagttattgagggtgcatgctgcactccacaccagagctttgacgacaccactcgtttcaatgggggaattctgtggcatggtgtaaagcacagcaaaatcttcaataacgaagccaattttaatgtacttacgaattggcggtcacgttaatctttccatcaatattgctttcttcgtaaaggctcgagtttttatgctaaagattgcaagttgcttgtaaaagataagtacactgatccataatcgctgttgttgagggtgcatgctgcacaaaattaaagttaaaaagtaaaacccccgttccttaccagttcgggggttttactttttaaagagaacggtattatttttaactttcaataattaccgtggcacaagcatagtgccgctcatctgccagcgttacatgcatatttgcaacgcccagcttttccgccagttttaatgcctcgccccatagccgtagccgtggtttgccgagctcatcattgaatacttcaaattgattaaacgccagaccattgcggatcccggtgccaaacgcttttgctgcggcttctttcacagcaaaacgcttcgccagaaaacgcaccggctggtggtgcgttttccagatagcccattcgttatcgcttaatacgcggcgtgccaggcgatcaccggatcgggcgatcaccgcttcgatgcgagcgatctccacaatatccgtgcctaaacctaatattgccattagccacgcgcttccagcatcagacgcttcatttctgccaccgcatctttcagtccggtcatcactgcacgaccaataatggcatgaccgatattcagttcatgcatctcagggatggcggcaatggctttcacgttgtgataggtcagaccgtgtccggcgttaactttcagaccgaggcttgcggcaaaggtcgcggctttggcgatacgcgccagctcttgcgcctgttcggcgtcagttttggcatcagcatagcaaccggtgtggatctcgataaacggtgcgccaacctctgccgcagctttgatctgctcttcatcggcgtcaataaacagagaaacctgaatcccggcatctgccagacgtttgcaggcatcgcgcattttgtcacgctgccctgcgacatccaggccgccttcggttgttacttcctgacgcttttccggtaccaggcagcaaaaatgtggcttcgtctcaacggcgatcgccagcatctcttcggtcaccgccatctccagattcatgcgggtatccagcgtctgacgcaggatgcgcacgtcgcggtcagtaatgtgacggcgatcttcacgtaaatgcacggtaatgccgtccgctcccgcctgctcggcaataaacgcggcctgcaccggatccgggtaagcggtaccgcgcgcgttgcgcagcgtagcgatatggtcaatgttgacgcctaacagtaattcagccatgacaatcctcatcattcataatgtgttttcaccgttcgcttaggcataaactgccggaacagttccctgctctttaaaggtttaccgccaagatacggcttaagcgccatgcgggtaaagcgtttcgcggcgcgcagtgtgtctgcgtcaggaaattcccgtgcgtttaacgcttttaactgccttccggtgaacgttttattgtcgataacgacgcttgcgataaaccctttttcttcgcgataacgatacgtcatggtgtcatctaccggctcgccgctacccgcacaatgggtaaaattgacgccataacccagatgcccgagcagtgccagttcaaagcggcgcagcgcgggttctggcgtaccagtgacccctgcaagagactgaatgcagtgcaagtaatcgaaaaaaagttcagagaagcgcgtctcgtattccagtacgcgggagagaagttcgttgatgtacagaccgctgtaaagcgtgataccgcttaatggcagcgccaggctgacggcttcagcactgcgcagcgttttgacttcgccacgcccgccaaaacgtagcaagagaggggtgaaaggctgtaatgcacctttcagggtagagcgtttagagcgtgcgcctttggcaaccagacgcacgcgcccgctttcctccgtgaagacgtccagcatcaggctggtttcgctccacgggcgactatgcaggacaaatgcgcgctgccagccttccatcggagttactcttaaagatcgtcaacgtaaccgagactgcgcagtgcgcgttcgtcgtcggcccaaccggatttcacttttacccacagttcaaggtgaacaggcgcttcgaacatttcctgcatgtctttacgcgcttcaatcccgatggttttgatcttggcccctttgttgccaatgaccatcttcttctgcccttcacgctcaacgagaatcaaaccgttgatgtcataaccaccgcgttcgttagagacgaaacgttcgatctccacggtcacggagtacggcagttcagcgccgaggaaacgcatcagtttttcgcggatgatttcagacgccataaaacgctgactgcgatcggtgatgtaatcttccgggaagtgatgagtcgcttcaggtagatgcttacgcacgattgccgcaatagtgtcaacattcagcccggtttcggcagagattggcacgatatcgaggaagttcatctggcttgccaggaactgcaggtgcggcagcagatcggctttctcctgcacgttgtccactttgttcaccgcgaggattaccggcgctttgccttcgcgcagtttgttgagcaccatttcgtcgtccggcgtccagcgggtgccttcaacgacaaaaatcaccagctcaacatcgccaatagagctgctcgccgctttgttcatcaggcggttaatggcgcgtttttcttccatatgcaggcccggtgtatcgacgtagatcgcctgatacgcgccttcagtatggatccccacaatgcggtgacgagttgtctgcgccttgcgggaagtgatggagattttctgccccagcagtttgttcaacaatgtggatttgccaacgttcggacgtccgacgatggcaataaatccgcagtaacttttatcgatgctcattccagctccagttttttcaacgcctgttcggcggcagcctgctcagccttacgacggctactacctgtgccaaccaccggttcactcaggccgctgacctggcagtggatagtaaattcctgatcgtgcgcttcgccacgtacctggactaccagataagtcggcagcggcagatggcgaccctgcaaatattcttgcaagcgcgttttcggatctttttgtttatcgcctgggctaatttcgtccaaacgagtttgataccagttgaggattaatttctcgacggtttgaatatcactgtcgaggaatacgccaccaattaatgcttcgacggtgtcggcgagaatactctcacgacgaaatccaccgcttttaagttcacctggccctaaacgtaagcactcgcctaactcaaattcgcgcgccagttccgccagcgtattgccacggaccagcgtggcgcgcatccggctcatatcgccttcatccacacgagggaaacggtgataaagcgcattggcgataacgtagctcagaatagagtcgcctaaaaattctaaacgctcgttatgtttactgctggcactacgatgagttaatgcctgctgcaacagttcctgatgattaaaagtgtagcccagcttccgttgaagccgattaattacgatggggttcatgcgataccaataaataaatgcgtcaacaattcagcacacgaaacagacctgatatacatggttctgctaactgcttcgctgcagtttcagtttaccggtatatggggaccaacgctgtttcgtgtgccgtggcaacctggaggtgccaaccttaaacttcgggggaatattctatacacaacgacgggggatgtcgttagccacgggagatttatctcataaataattcacgttgtcgccataacggcgacaacgtgaacgaagatggctattaatggatgccgccaatgcgacttaagcgcagaccagtcggccattcgccttcttgcttatcgaagctcatccagatagccgttgcccgaccgaccagattcgcttccggcacaaagccccagtaacggctgtccgcgctgttgtcgcggttgtcgcccatcatgaagtattgtcccggaggaacaatccaggttgccagttgttgccctggctgctggtaatacatccccacctgatcctgcgcaatcggcactgtcagaatgcggtgcgtcacatcacccagtgtctctttacgctcggaaagacgaattccattttctttggtttcgtttttcggcacttcaaagaatccgctggtcgcttccccaccattacggcgactgaaggtctgaacgaaatcgctcggttccacgttactgtaggtgaccggcagcgcgttttcacacgcctggccggaactgcatcccggttgaatcgtcagctctttactgaccggatcgtaagtgactttatcgcccggtaaacccaccgcgcgcttgatgtaatcaagctttggatcttccggatatttaaagaccacgatatcgccgcgtttcggatgaccggtttcgatcagcgttttctggtagataggatctttaatgccataagcaaacttctctaccagaataaaatcaccaattaacagagtcggcatcatgctaccactcgggatctggaacggttcataaataaagctacgcacaatcaatacgatagccagtaccggaaaaacagaagcaccggtttccagccagccaggcttcggcgcaacctttttcaacgttgctttatccagactgtccccggcagccgcctgcgccgctgcctgacgttcccgccgtttaggtgcgaaaaagaatttatccacgcaccataaaatgcccgtcaccagtgtggcaatcaccagaatcagggcaaacatattcgccatgccaactcctaagggttatttgttgtctttgccgacgtgcagaatggcgaggaacgcttcctgcggcagctcgacgttaccgatctgcttcatgcgtttcttaccttctttctgcttctgcagcagctttttcttacggctgatatcgccgccataacatttagccagtacgtttttacgcagctgtttcacggtggatcgcgcaatgatgtgcgtaccaatcgctgcctgaatggcgatatcaaactgctggcgtgggatcagatctttcatcttctccaccaactcgcgaccgcggttttggctattatcacggtgggtgatcaacgccagcgcatcaacacgttcaccgttgattaatacgtctacacgtaccatgtcggacgcctggaagcgcttgaagttgtaatccagagacgcataaccacggctggtagatttcaggcgatcgaagaagtcgagcaccacttccgccatcgggatctcgtacgtcagcgccacctgattaccgtggtaaaccatattggtctgcacgccgcgtttttctacgcacaacgtaataacgttgccgagatatgcctgcggcagcagcatgtgacactctgcaatcggctcgcgcagttcgtagatgttatttaccgcaggcagcttggatgggctgtcgacgtagataacttctctactcgtggtttcaacttcatacactacggtcggcgcagtggtgatcagatccagatcgtattcacgttccagacgttcctggatgatctccatgtgcagcaggccgaggaagccgcagcggaaaccaaagcccagcgcgctggagctttccggctcatagaacagactggcatcgttcaggctgagtttacccagcgcgtcacggaaggcttcatagtcgtcggaacttaccgggaacagaccggcgtatacctgcggtttgactttcttaaagccaggcagcgccttttctgccggattacgcgccagcgttaaggtatcgccgactggagcgccgtggatatctttaatcgcacatacgagccagcctacttcgccacatttcagttcagtgcggtcaacctgtttcggcgtgaagatgcccagacggtcggcgttataggtctgcccggtactcatgactttcactttgtcgcccttacgcagggtgccgtttttaatacggataagactaacaacgcccaggtagttgtcgaaccaactgtcgataattagtgcctgcaacgggccttccggatcgccttccggcggcggaatgtcgcgcaccagacgttcgagaacgtcctgcacaccaacgccggttttcgcactacagcgcaccgcgtcggtggcgtcgatgccgacgatatcttcaatttcttccgccacgcgttcaggatcggctgccggcaggtcaatcttgttcagtaccggcacaacttcgagatccatttccatggcggtgtagcagtttgccagggtttgcgcttctacgccctgcccggcgtcgaccaccagcaatgcaccttcacaggcagccaggctacgggaaacttcataggagaagtctacgtggcccggggtgtcgataaagttaagctgataggtttcgccgtcagacgctttgtagtccagcgtcacgctttgcgctttgatggtaatgccacgctcacgctcaagatccatggaatcgagaacctgcgcctccatttcacggtcagacaggccaccgcagatctggataatacggtcagacagcgtgcttttaccgtggtcaatgtgagctatgatgctaaagttacgtatattcttcataaagtatgattattgtgccttaatgcccggttaaccaggcttttagaagtcgctgttctgagcttaacgtctgtattaatagaaacgccgcattctacactacaacattgaggcgaggaaatgttcataccgtatggattgtggtatctggaaacgtcctcgcatttgttatgcaaaatgcaacaaagccagtgaaatcactggctcgcgtcttcgctagatgtttcaaatcgcacaaggccaggcggcaatgccacgcttaagatgatcggttgccattctgcccgggcagcaaacttacggctgtagccgcgcgcaatcaggaacccgccaataccaccgaggatcgcaccacataatgctgcgacgtcagaagcaaagagtagctgaaataggctagcgataaggaataatcccaccagcgggctcatataaaccagtaatgcggagctaagcaggctgccttcggcgatccccaattccactttttgccccggcactaacggctcatcacagggtacgacaatggtatgcgtggtttgcgggccaagtttatttaacacgcggctaccgcaaccggcgcgactagcgcagctgctgcaactagctttaacatcacaactgaccagcgcctgcccgttttgccaggagacgacggtagcccactctttgatcattgcgctgccccgaacttaatattctcggcaatgcgtttcgccgtttgcggcggcagttcaccgacaatggtgatttcggcgttatcacgtacgcttgtactgacggttctgcgtccggtgcgcaacatctgatcggtgctgcttggcgtagcgcggttaacgtttacgctgaagctgaataatccgtcggaatagagacgactttcgataggcatgttgtccatcgtcggtagcggacgtcgactactggaaacttcgctaaaaccctgtggcaaccaggttggcgtccagctgaatttagctttttcacctacaggaacagaaagcaacggcggcaaatttgccttcgccagcgtctgcatactgctgctgatatcctgattgacgttaaaagcaatcacgcgaaattgttccagcgtttcaccatcgcgatcaaggagatcaacccgcatcggtaatttgctttcggtgtccatccacacgatgtagctgtagcgtgtaccatctcgggcaaccacgcgaatgacttcgcaaagacgatcagcaatacgcgtgcgcccgacggagataaagtcgtagtaaggagaaaggcgtttgaaatcggtatagataaggcttggcagagaatcaacaatgtaatcgccattaagcgtgaacggttcaagtcccggttcaaaatagctgatttcattgccgcgctgtaccacttcccggcgcgggccatccatttgcaacaattgtgcaagaggacggttatcgaggcgtgcatgtcgataacgcagagactcaacaccctgtttattgatgctgatgaaactcagctcgtaattcagactctgactggccaggttcatctgctgtaataacgccccggacgcgggagtggcgctggcgttagcagagaataacaggctacctgtcactaaactcatggcaaaccaaagttgcttcattactggctttgcgttcctaaagtttgaattcctggcacctgtacagcggcttgctgggtttgcgcctgctcaaactgaagctgttcagagtggagtcggcgttgcagttcgtaatcctgcaacattgcattaatgcgacgacgctgctcctgtacctgctgctgttgaccattgtttgcggtcgcttcagaaggtactcccaggcttaccgggctggctttacccatcatcggcagtgtattaaataccggcgtttcgggctgctgggacgtttcagattgtccattatagtgctggacgccaacgataactgcaaggcttacgcatgcggctacgcccatttgggtaagctgtgccgcccacggacgtactttctgccagaatggcattttctgccattgatgcggcgcaggctgggcttccgggatcaatgtcgccggttgacgtactggctcttcttcaatggcggccatcacgcgactagagatatcgaaatggagcacctcgggagtatcaccccgcatactgtcacggattaagtgatagctttcccaggttttctgcatttctgggttatgagccagttcgttaagcagctcactatccagcgtttcgccatccattaaagcggaaagttgttctttctgcatgcctaatacccttatccagtatcccgctatcgtcaacgcctgataagcggttgaactttgttatcaatagcttccctcgctcggaagatacgactacgcaccgtacctaccggacaatccatgatagcggctatctcttcatagctcaggccatccagctcccgcaaggttattgccatgcgtaaatcttccgggagggactcaatagttcggaaaactatctgtctcagttcttcactcaacattaagttctcagggttgctaatttctttcaacgcgccgccactttcgaagttttcagcttcaatggcatccacatcactggaaggtggacgacgcccctgagcaaccaggtaatttttcgctgtatttacagcaatccgatacagccatgtataaaaagcgctatctccccggaagctatccagcgcacgataggctttaataaaagcttcttgtaccacatcgggaacatcaccgctcggcacatagcgggaaaccagactcgccactttatgctgatagcgcactaccagtaagttaaaggctttctgatctcccttctggacccgttcaaccaggacctggtccgttaactgctcgctcatccgaggtaaagtctccccaaaccaaatttccacgcgctatcgaaacgccactccattagctgcaatttgagcaagcaaagggttagagtgtctcgtttttgtaaagttccgtaacgcatctgtttttgtttgtcatgctgtagacggatcattatctatcattataagtctacagaatctgaacatcgcattatctgtgtagaaatgcccatttaactgcctgaagagtaacccaacggcctttttatttcaccacctaatcctccaccagccagtaacttctctttttctcgccgccctgcgtcagcgtgtttagcaactgtaacaaatattaaaatagcaggtgtttatccgcacaacatgatgctatgctgaccaaaccatgtttagtaaattaaacaaagaaaatgaatactctccctgaacatagttgtgacgtgttgattatcggtagcggcgcagccggacttagtctggcgctacgcctggctgaccagcatcaggtcatcgttctaagtaaaggcccggtaacggaaggtagtacattttatgcccagggcggtattgccgccgtgtttgatgaaactgacagcattgacagccatgtggaagacacattgattgccggggctggtatttgcgatcgccatgcagttgaatttgtcgccagcaatgcacgatcctgtgtgcaatggctaatcgaccagggggtgttgtttgatacccacattcaaccgaatggcgaagaaagttaccatctgacccgtgaaggtggacatagtcaccgtcgtattcttcatgccgccgacgccaccggtagagaagtagaaaccacgctggtgagcaaggcgctgaaccatccgaatattcgcgtgctggagcgcagcaacgcggttgatctgattgtttctgacaaaattggcctgccgggcacgcgacgggttgttggcgcgtgggtatggaaccgtaataaagaaacggtggaaacctgccacgcaaaagcggtggtgctggcaaccggcggtgcgagcaaggtttatcagtacaccaccaatccggatatttcttctggcgatggcattgctatggcgtggcgcgcaggctgccgggttgccaatctcgaatttaatcagttccaccctaccgcgctatatcacccacaggcacgcaatttcctgttaacagaagcactgcgcggcgaaggcgcttatctcaagcgcccggatggtacgcgttttatgcccgattttgatgagcgcggcgaactggccccgcgcgatattgtcgcccgcgccattgaccatgaaatgaaacgcctcggcgcagattgtatgttccttgatatcagccataagcccgccgattttattcgccagcatttcccgatgatttatgaaaagctgctcgggctggggattgatctcacacaagaaccggtaccgattgtgcctgctgcacattatacctgcggtggtgtaatggttgatgatcatgggcgtacggacgtcgagggcttgtatgccattggcgaggtgagttataccggcttacacggcgctaaccgcatggccagcaatagtttgctggagtgtctggtctatggctggagcgcggcggaagatatcaccagacgtatgccttatgcccacgacatcagtacgttaccgccgtgggatgaaagccgcgttgagaaccctgacgaacgggtagtaattcagcataactggcacgagctacgtctgtttatgtgggattacgttggcattgtgcgcacaacgaagcgcctggaacgcgccctgcggcggataaccatgctccaacaagaaatagacgaatattacgcccatttccgcgtcagtaataatttgctggagctgcgtaatctggtacaggttgccgagttgattgttcgctgtgcaatgatgcgtaaagagagtcgggggttgcatttcacgctggattatccggaactgctcacccattccggtccgagcatcctttcccccggcaatcattacataaacagataaaaagcctgggtcagcgccgtatacgcttcggaatagttctggtctggcccacgaatgactaagcgatcgctaaagcattctcccgcctgcggggagaatgccagcagcacccgatgcggcagtcgcgcttcgttttccgccacatccgtccgcaaacgtaaatgccagcccatgcttaatgccagctccgtaaaaccattaccaatctgctctggcagcactacgcagaaaaatccctcttcggtaatgcactccgccgcacaggtcagcaagcttgggtgatcaagcgtagtggtatagcgagcctgttcccgttgaggtgtgctgcactctactccctgctgatagtaaggtgggttactgatgattaaatcgaagcgtactgtctgctgtgtaatccactgctgaatatccgccgtatggacgttaatccgctctgcccacggggactggttgatattttcctgcgcctgcgcggcagcttcactttccagttcaactgcatcaatcatcacgctgtcatcggttcgctgcgccagcattaatgccagcaacccgctacccgcgccgatatcaaggcaacgttttaccccagccaccggtgcccatgcgcccaataaaataccatccgttcccactttcatcgcacagcgatcgtgagcaacaaaaaactgtttaaaagtaaatccattacgacgaagcacggatgtagactgactcatgaaaataaaaccttgcaggaaaaacggcgatagcaccgggtgagaacaatacccgagaagcgatatccatacaaacagatgaagattgcagccgtaacgtctataatcagcgccccacacagaggtagaacatgactgtaacgactttttccgaacttgaactcgacgaaagcctgctggaagccctccaggataaaggtttcactcgcccgaccgccattcaggctgccgccattccgcctgcgctcgatggccgtgatgtactcggttctgcgccgacaggcaccggtaaaacggcggcgtatctgctgccagcgttgcagcacctgctcgatttcccgcgtaagaaatccggtccgccgcgtattttgatcctcaccccaactcgcgagctggcgatgcaggtgtccgatcatgcccgcgaactggcgaaacatacgcatctggatatcgccaccatcaccggcggcgtagcctatatgaaccacgcggaagtgttcagcgaaaatcaggacatcgtggtcgccacgaccggacgtctgctgcaatacataaaagaagagaacttcgattgccgcgcggttgaaacgctgatcctcgacgaagcagaccgtatgctggatatgggcttcgctcaggatatcgaacatattgctggcgaaacgcgctggcgtaaacagaccctgctctttagcgcaacgctggaaggcgatgcgattcaggactttgccgagcgtctgctggaagatccggtggaagtttctgccaatccctccacccgtgagcgcaaaaaaattcatcagtggtattaccgcgccgatgatcttgagcataaaaccgcgttgctggtgcatctgttaaaacagccggaagcgacccgcagtattgtgtttgtgcgtaagcgtgagcgtgtgcatgagctggcaaactggctgcgcgaagcgggcatcaacaactgctatctcgaaggtgagatggtacagggcaagcgtaacgaagcgatcaagcgtttgaccgaaggtcgcgtaaacgtactggtcgcaaccgatgttgccgcgcgcggtatcgacattcctgacgtcagccacgtctttaacttcgatatgccgcgcagtggcgatacttatttgcaccgtatcggacgtaccgcgcgcgccggtcgtaaaggcaccgcaattagcctggtggaagcccatgaccatctgctgctgggtaaagtaggccgctatattgaagagccaattaaagctcgcgttattgatgagttacgcccgaaaacgcgtgcgccaagcgaaaagcagaccggcaagccaagcaagaaagtactggctaaacgtgctgagaagaaaaaagctaaagagaaagagaagccgcgggtgaaaaaacgccatcgcgacaccaaaaatattggtaagcgccgtaaaccaagcggaacgggcgtgccaccgcaaacgacagaagagtaatctcaatgccaggtttaagcctggtattaaaagtgctggcaaacgcaaaactgcctgatgcgctacgcttatcaggcctacgtggctcatgcaatatattgaatttgcacgatcttgtaggccggataaggcgttcacgccgcatccggcatgaataaagcgcactttgtcgacaagttaaatgccgggtttaatcccgacattatttttatccagccacaaaactctcttcaacacactgaataaaagtgtgcatcgccgggctaaccgcttttccagcatgatgtgcgcacatggccgtaatggtctggctctgttcgccaaaaggcaattcaattaattctccgcactccaactcttttgccaccgcaaagcgcggtaggtagctgaccccgatattcgccgcgacacaacgcttgatgctttcgatacttataagctcaatggtgttttccaccgtgatccgccgctgacgcagcgtgctctcaaatatctgccggaagacacattgcggttcgttgataataaagctacaggcgttatgtcttcccggctcagtaaaatcgacatctgcaatttgcggactagccaccagcaccagactttgttcacccaactctcgtcgattcagagcatcatcattccctacacgataaaagacgccaacatcggcctcatcattcagtagcgcatcacggatcacgtaacagttcaggctctgcaagcttaaacgcacttttggggcgcgttgccgaaaacgctgcaacacctgcggcattcggtaagagagcaacgtttcgccgctaacaacgcgtagttccccgtccggatcactctcctttttggcagcctcacgaagcgtatccatcactcgggtaagttcataaatgtgcggcagcaacttttttccttcgcgggtaaggcacatccgtcggccaattttctcaaataactggacactaaactcctgctcaagctgctgaatatgaaaagtcaccgtgctttgtgtacagcacaatttttggctagctcgcaaaaaggaaccctcttccaccacggttttaagcgtaataaaacggcgcagatccataaccccaaacctatcgaaaatatcgaatctagaatataaaaacattcatttttttaaatgttccgtgtcgggtactgtctaccaaaacagaggagataacaagtgacaccgacccttttaagtgctttttggacttacaccctgattaccgctatgacgccaggaccgaacaatattctcgcccttagctctgctacgagccatggatttcgtcaaagtacccgcgtgctggcagggatgagtctgggatttttgattgtgatgttactgtgtgcgggcattagttttagtctggcagtgattgacccggcagcggtacaccttttgagttgggcgggggcggcatatattgtctggctggcgtggaaaatcgccaccagcccaacaaaggaagacggacttcaggcaaaaccaatcagcttttgggccagctttgctttgcagtttgtgaacgtcaaaatcattttgtacggtgttacggcactgagcacgtttgttctgccgcaaacacaggcgttaagctgggtagttggcgtcagcgttttgctggcgatgattgggacgtttggcaatgtgtgctgggcgctggcggggcatctgtttcagcgattgtttcgccagtatggtcgccagttaaatatcgtgcttgccctgttgctggtctattgcgcggtacgcattttctattaacgaaaaaaagcggaagaggtcgccctcttccgcttagtaacttgctacttaagccttacaggctttcagtaaaggtacgagcgataacgtcgcgctgctgttccggagtcagagagttaaagcgaactgcataaccggatacacggatggtcagctgcggatatttttccggatgcttaactgcatcttccagagtttcgcgacgcagaacgttaacgttcaggtgttgaccaccttcaacgcgaacttctggtttcacttctactggaacttcacggtattcaatgtcacccagtttgcttactgcaaccacttcatcttctgcataacctgcttttgcaacgatgcaacgcgcttcgcctttttcgctgtccagcagccagaaagagttcagcagatcgtcgttagcggctttagtaatctggatacctgtaatcatgtgatgcctccccggcaaaattatttgatttgttcagcctgtcgcggccaattggtaaaaccattgttgcttgagtgtatatatactcctcaaacacccttgaatctttgatttaaatcaataaaaaccacacatcaagtatggtcgcaaatggattttattgttttacatcaacttatgcgggtgtgaaattttaccaatttacatttttttgcactcgtttaagtctaaaaaatgagcatgattttgttctgtagaaagaagcagttaagctaggcggattgaagattcgcaggagagcgagatggctaacgaattaacctggcatgacgtgctggctgaagagaagcagcaaccctattttcttaatacccttcagaccgtcgccagcgagcggcagtccggcgtcactatctacccaccacaaaaagatgtctttaacgcgttccgctttacagagttgggtgacgttaaagtggtgattctcggccaggatccttatcacggaccgggacaggcgcatggtctggcattttccgttcgtcccggcattgccattcctccgagtttattgaatatgtataaagagctggaaaatactattccgggcttcacccgccctaatcatggttatcttgaaagctgggcgcgtcagggcgttctgctactcaatactgtgttgacggtacgcgcaggtcaggcgcattcccacgccagcctcggctgggaaaccttcaccgataaagtgatcagcctgattaaccagcatcgcgaaggcgtggtgtttttgttgtggggaagccatgcgcaaaagaaaggggcgattatagataagcaacgccatcatgtactgaaagcaccgcatccgagcccgcttagcgcgcatcgtggattctttggctgcaaccattttgtgctggcaaatcagtggctggaacaacgtggcgagacgccgattgactggatgccagtattaccggcagagagtgagtaaatttgcggggaaatgccggatggcagagttgccacccggctgatttatcaggctttattctgacgccaccattcaccaagcaaaacgccggttgcgacagagatattcagcccggcaacgttgcccgtaccgtcaatcttcacgcgcagatcgttcggatcgcgtgcggcatccggtaacccttcatattcctgacccagcaccagtaccattttcgctggcagactagttttgaacagcggtttaccctgctcgctggaagtggtcactacggtgtaacctgcctgacggaaatcatccagcacgttaacaatgttgtcgccagtaatcggctgaacgtgctctgcgccgccttctgcggtacggatagccgccccgctctccagcagtgccgcatcctgcaccacgacacctttcacgccgaagtgcgcgcagctgcgcatcatgccacccaggttatgcgggttagattcgttttccagtgccagaacgcaatcctgcgcgcctgcctggcttacccactgctgcacggttgtaccgttacgctttttgatcaagaagcaaacgccgccgtgatgttccgtgccactcgcttttgtcaattccgcttcatccaccacatggtacgctttgcggtttgctgccatccagcgcaaagcttctttaaaacgcggcgttacactctggataaaccaggcgcgaacaatcgcttccggacggctctggaaaagtgcctgacatgcattttcgccgtagacgcgggtttcttccgcacgctgacgacgcaacacttccggatcaataaaacttttaccactgatgccaccgtgatcggccttttccggcgtctcatcacccggcgcgcgggaaaccgtgcgccacgggctatcttcccacttgcggtcacggggctgactctgtttgtcatcgcgggcggggcgacggccaccgtcagcacgagattttcctggacgcccgccccctttcccggtacgcgggttgtgggtacgtttatcagaatcatcatcactgcggacatacatcactttgaccttgccgcttttacctttcatttcatcgttcatgcttttctccaccagcgctgcgcgaagcgcgcagattacccgaagtccgcgcggttcgccatgatttcgtaccaaagcctgcgactatcatacctattgaataaaacagattgttgtctggaacaatgtccccgataatatgtaacatattagaaacataccggcgtcgttgccgataagtctccttactcatcccgaggttagttatgaataccgtttgtacccattgtcaggccatcaatcgcattcccgacgatcggatcgaagatgcggcaaaatgcggacgctgcggtcacgacttgtttgacggagaggtgattaatgcgaccggtgaaacactcgacaaattgctgaaggatgatctacctgtggtgatcgacttctgggcaccgtggtgcggcccctgccgtaatttcgcaccaatttttgaagatgtcgcgcaagagcgtagcggtaaagtgcgctttgtgaaagtgaataccgaagctgaacgtgaattgagcagtcgctttggaattcgtagtataccgacgatcatgattttcaaaaacggtcaggttgtcgacatgcttaatggcgcagtaccgaaagcgccgttcgatagctggctgaacgaatctctttaatcttaccggggcgcatcttgtgccccgttttctcctctgcgacaatggcgttttttcgacgctctcttatgaccgaaaacgctgttctccagttacgcgccgagcgtattgcgcgcgcaacacgtccttttcttgcccgcggtaatcgcgttcgtcgctgccaacgctgtcttttgccagagaaattatgtctctgtagcacaattaccccagcacaagcaaaaagtcgcttctgtttgctgatgttcgacaccgagccaatgaagcccagtaataccgggcgtctcattgctgatattttgcctgataccgttgcgtttcaatggagccgtaccgaacccagccaggatttgctggagttggtgcaaaacccggactatcagccaatggtggtctttcccgctagctatgctgatgagcaacgggaagtgatcttcacaccacctgccggtaagccaccgctgtttatcatgctcgatggtacctggccggaagctcgcaagatgtttcgtaaaagtccgtatctggataatcttcccgtcatttccgtcgatctttcccggctttctgcctatcgcctgcgtgaagcccaggctgaaggccaatattgtactgccgaggtagccatcgcactgttagatatggccggcgataccggggcggcggcagggttaggcgagcattttacccgctttaaaacacgctatctggcaggaaaaacgcaacatctgggtagcatcacagcagaacagttagaaagcgtttaaaatcattcggtcacttctgcgggagaccggtatgagtcagcgaggactggaagcactactgcgaccaaaaagcatagcggtaattggcgcgagcatgaaacccaatcgcgcaggttacctgatgatgcgtaacctgctggcgggaggctttaacggaccggtactcccggtgacgccagcctggaaagcggtgttgggtgtgttggcctggccggatattgccagcttgccctttacacccgaccttgcggttttatgtaccaatgccagccgtaatcttgctcttctggaagagctcggcgagaaaggctgtaaaacctgcattattctttccgccccggcaagccaacacgaagatctccgcgcctgcgccctgcgccataacatgcgcctgcttggaccaaacagtctgggtttactggctccctggcaaggtctgaatgccagctttagccctgtgccgattaaacgcggcaagctggcgtttattagccaaagcgctgccgtctccaacaccatcctcgactgggcgcaacagcgtaagatgggcttttcctactttattgcgctcggcgacagcctggatatcgacgttgatgaattgcttgactatctggcacgcgacagtaaaaccagcgccatcctgctctatctcgaacagttaagcgacgcgcgacgctttgttagcgcggcccgtagtgccagccgtaataaaccgattctggtgattaaaagcggacgtagcccggcggcacagcgactgctcaacacgacggcaggaatggacccggcatgggatgcggctattcagcgtgccggtttgttgcgggtacaggacacccacgagctgtttagcgcggtggaaacccttagccatatgcgcccgctacgtggcgaccggctgatgattatcagcaacggtgctgcgcctgccgcgctggcgctggatgccttatggagtcgcaatggcaagctggcaacgctaagcgaagaaacctgccagaaactgcgcgatgcactgccagaacatgtggcaatatctaacccgctcgatctacgcgatgacgccagcagtgagcactatattaaaacgctggatattctgctccacagccaggattttgacgcgctgatggttattcatagccccagcgccgctgctcccgcaacagaaagcgcgcaagtattaattgaagcggtaaagcatcatccccgcagcaaatatgtctctttgctgacgaactggtgcggcgagcactccagccaagaggcacgacgtttattcagcgaagccgggctgccgacctaccgtaccccggaaggaaccatcactgcttttatgcatatggtggagtaccggcgtaatcagaagcaactacgcgaaacgccggcgttgcccagcaatctgacttccaataccgcagaagcgcatcttctgttgcaacaggcgattgccgaaggggctacgagcctcgatacccatgaagttcagcccatcctgcaagcgtatggcatgaacacgctccctacctggattgccagcgatagcaccgaagcggtgcatattgccgaacagattggttatccggtggcgctgaaattgcgtagcccggatattccacataaaagcgaagttcagggcgtcatgctttacctgcgtacagccaatgaagtccagcaagcggcgaacgctattttcgatcgcgtaaaaatggcctggccacaggcgcgggtccacggcctgttggtgcaaagtatggctaaccgtgctggcgctcaggagttgcgggttgtggttgagcacgatccggttttcgggccgttgatcatgctgggtgaaggcggtgtggagtggcgtcctgaagatcaagccgtcgtcgcactgccgccgctgaacatgaacctggcccgctatctggttattcaggggatcaaaagtaaaaagattcgtgcgcgcagtgcgctacgcccattggatgttgcaggcttgagccagcttctggtgcaggtttccaacttgattgtcgattgcccggaaattcagcgtctggatattcatcctttgctggcttctggcagtgaatttaccgcgctggatgtcacgctggatatcagcccgtttgaaggcgataacgagagtcggctggcagtgcgcccttatccgcatcagctggaagaatgggtagaattgaaaaacggtgaacgctgcttgttccgcccgattttgccagaagatgagccacaacttcagcaattcattagccgagtcaccaaagaagatctttattaccgctactttagcgagatcaacgaatttacccatgaagatttagccaacatgacacagatcgactacgatcgggaaatggcgtttgtagcggtacgacgtattgatcaaacggaagagatcctcggcgtcacgcgtgcgatttccgatcctgataacatcgatgccgaatttgctgtactggttcgcagcgatctcaaagggttaggcttaggtcgacgcttaatggaaaagttgattacctatacgcgagatcacggactacaacgtctgaatggtattacgatgccaaacaatcgtggcatggtggcgctagcccgcaagctcgggtttaacgttgatatccagctcgaagaggggatcgttgggcttacgctaaatcttgcccagcgcgaggaaagttgagtaaggtactggaaatgttgaccacttaatcgggactggtgttattattgcccgcttatgtcgtctgcattgcacagaggacccttcaatgaacagagaagaaatgcactgtgatgttgagtaaatttaagcgtaataaacatcaacaacaccttgcccaactacccaagatttctcaaagtgttgatgatgtcgatttcttttacgctcccgccgacttccgggagacgctgctggaaaaaatagccagcgcgaagcagcgcatttgcattgtcgccctgtatctcgaacaggatgacggtggcaaaggcattctgaacgcgttgtatgaggctaaaaggcagcgtccggaactggatgtgcgggtgctggtcgactggcatcgtgcacaacgtggacgcattggcgctgcggcatctaacactaacgctgactggtactgccgcatggcgcaggaaaatccgggcgtagatgttccggtttatggcgttccaatcaatactcgtgaagcccttggtgttctgcactttaaaggctttatcatcgacgatagcgtactttatagcggtgccagcctgaacgatgtttacctgcatcagcacgataaatatcgctacgaccgttatcatctgatccgtaaccgtaagatgagtgacattatgtttgaatgggttacacagaatattatgaatggccgcggcgttaatcgtctggatgatgttaatcggccaaaaagcccggaaatcaagaacgatattcgtctgttccgccaggagctgcgtgatgccgcttatcatttccagggcgatgccgacaacgatcagctttctgtaacgccgctagtggggctggggaaaagcagtctgttgaacaagaccattttccatcttatgccttgtgccgagcagaaactaaccatctgtacgccatacttcaacctgccagcaatccttgtgcgcaatattatccagttgctgcgcgaagggaaaaaggtcgaaattattgttggtgataaaaccgcgaatgacttctacattccggaagatgaacctttcaagataattggcgcattgccttatctctatgagatcaatctgcgtcgtttcctgagccgtttgcagtattacgtcaatactgaccagctagtggttcggttatggaaagatgacgacaacacctatcacctgaaagggatgtgggttgatgataagtggatgttgatcaccggtaataacctgaacccgcgcgcctggcgtctggatctggaaaacgccattttgatccacgatccgcaacttgagctggcgccacagcgagagaaagaactggagctgatccgcgagcataccaccatcgttaagcactatcgcgatctgcaaagtattgccgattatccggtgaaggttcgtaaactcatccgccgtttgcgccgtatccgcatcgaccgattaattagccgcatcctgtaatcacaaccccgtcctgtacggggtttgttttttggaggccacgttttgcgtattctttttgtctgttcgctattgttactttctggatgcagccatatggctaacgatagctggagcgggcaggataaagctcaacactttatcgccagcgcgatgctttccgccgccggaaatgaatatagtcagcatcaggggatgagccgggatcgcagtgccatgtttggattgatgttctctgtcagtttgggggcgagtaaagagctttgggatagccgccccgaagggagcggctggagctggaaggatttggcctgggatgtcgccggtgcaagcaccggctataccgtctggcaactgacccgtcattaaagacgcatccccttccctttgcgatgtagcatcaaagaaaccagaaacgccaccacggccatcaaggtcacataccagaagaaggctgtttccattcctatacttttcaggctcaacgctacgtactccgcgctaccaccaaatatagcattagcgaccgcataactcagaccaacgcctaatgcgcgaacctgtgccgggaacatctcagccttcagtattccactgatacttgtataaaaactcactatcagcagggcacacatcaccagaccaaaagcggcataagggctggaaacgttttgcaatgcactgagaataggaacggtaaaaatggctgccaggctaccgaaacataacatactggtacggcgaccaatcttatcgctcagcgcgccaatgagtggttgaataagcatgaatacaaacaatgcggcagtcataatgccactcgccacgttggcatgcattcccgcagtatttaccagatacttctgcatataagtagtgaaggtatagaaacaaagggagcccgcagcggtaaaaccgagaaccatgatgaatgcacggcgattgcgccataatcctttcagagatccagcttcttttaaagcgcgcgtttcttgttggctagtttcatctaactgacgacgtaaccacaacgccacaacagctaacacagctcctaacgcgaaaggaatacgccatccccactctctgagtgcagcgtcttccatggtgtgttgtaaaaccacgacaaccagtagggctagcagttgtccgccgatcaacgtcacatactgaaaacttgcgtaaaaacctttgcgcccttcaacggcaacttcactcatataggtggcgctggtgccatattctccgccaacagataatccctgaaataaacgagcgagaagcaataatgccggagcccacgtacctatagtttcataacctgggaggcaggcgataaccaggcttccgaaacacatcatacacacgcttaacagcatgctttttttgcgaccatgtttatcggctatgcggccaaatagccaaccgcctattgggcgcatcaggaatcccgcagcaaaaacacctgctgtttgtagtagttgagtcgtcgtgttcccggaagggaagaagatgtgggcaaagtagagactacagaagctgtagacatagaaatcgaaccactcgaccagattaccactagaggcccccacaatcgcccaaatgcggcgacgagtatcactacttgtcagtttgctgtctgccgttacagtactttcagccatgccattatgtctcctgccgtaatccgatgcttttgtcggtcgcttttgtttattttttttgtaaaggaaatattatacatttgttgcatatcattatgcaaccttaaccatgaatttagttagcaggaaaatggttattgaggagcttaaggataaatttctggtaaggaggacacgtatggaagtgggcaagttggggaagccgtatccgttgctgaatctggcatatgtgggagtataagacgcgcagcgtcgcatcaggcatttttttctgcgccaatgcaaaaaggccatccgtcaggatggcctttcgcataatttgatgcctggcagttccctactctcgcatggggagaccccacactaccatcggcgctacggcgtttcacttctgagttcggcatggggtcaggtgggaccaccgcgctacggccgccaggcaaattctgttttatcagaccgcttctgcgttctgatttaatctgtatcaggctgaaaatcttctctcatccgccaaaacagcttcggcgttgtaaggttaagcctcacggttcattagtaccggttagctcaacgcatcgctgcgcttacacacccggcctatcaacgtcgtcgtcttcaacgttccttcaggacccttaaagggtcagggagaactcatctcggggcaagtttcgtgcttagatgctttcagcacttatctcttccgcatttagctaccgggcagtgccattggcatgacaacccgaacaccagtgatgcgtccactccggtcctctcgtactaggagcagcccccctcagttctccagcgcccacggcagatagggaccgaactgtctcacgacgttctaaacccagctcgcgtaccactttaaatggcgaacagccatacccttgggacctacttcagccccaggatgtgatgagccgacatcgaggtgccaaacaccgccgtcgatatgaactcttgggcggtatcagcctgttatccccggagtaccttttatccgttgagcgatggcccttccattcagaaccaccggatcactatgacctgctttcgcacctgctcgcgccgtcacgctcgcagtcaagctggcttatgccattgcactaacctcctgatgtccgaccaggattagccaaccttcgtgctcctccgttactctttaggaggagaccgccccagtcaaactacccaccagacactgtccgcaacccggattacgggtcaacgttagaacatcaaacattaaagggtggtatttcaaggtcggctccatgcagactggcgtccacacttcaaagcctcccacctatcctacacatcaaggctcaatgttcagtgtcaagctatagtaaaggttcacggggtctttccgtcttgccgcgggtacactgcatcttcacagcgagttcaatttcactgagtctcgggtggagacagcctggccatcattacgccattcgtgcaggtcggaacttacccgacaaggaatttcgctaccttaggaccgttatagttacggccgccgtttaccggggcttcgatcaagagcttcgcttgcgctaaccccatcaattaaccttccggcaccgggcaggcgtcacaccgtatacgtccactttcgtgtttgcacagtgctgtgtttttaataaacagttgcagccagctggtatcttcgactgatttcagctccatccgcgagggacctcacctacatatcagcgtgccttctcccgaagttacggcaccattttgcctagttccttcacccgagttctctcaagcgccttggtattctctacctgaccacctgtgtcggtttggggtacgatttgatgttacctgatgcttagaggcttttcctggaagcagggcatttgttgcttcagcaccgtagtgcctcgtcatcacgcctcagccttgattttccggatttgcctggaaaaccagcctacacgcttaaaccgggacaaccgtcgcccggccaacatagccttctccgtccccccttcgcagtaacaccaagtacaggaatattaacctgtttcccatcgactacgcctttcggcctcgccttaggggtcgactcaccctgccccgattaacgttggacaggaacccttggtcttccggcgagcgggcttttcacccgctttatcgttacttatgtcagcattcgcacttctgatacctccagcatgcctcacagcacaccttcgcaggcttacagaacgctcccctacccaacaacgcataagcgtcgctgccgcagcttcggtgcatggtttagccccgttacatcttccgcgcaggccgactcgaccagtgagctattacgctttctttaaatgatggctgcttctaagccaacatcctggctgtctgggccttcccacatcgtttcccacttaaccatgactttgggaccttagctggcggtctgggttgtttccctcttcacgacggacgttagcacccgccgtgtgtctcccgtgataacattctccggtattcgcagtttgcatcgggttggtaagtcgggatgacccccttgccgaaacagtgctctacccccggagatgaattcacgaggcgctacctaaatagctttcggggagaaccagctatctcccggtttgattggcctttcacccccagccacaagtcatccgctaatttttcaacattagtcggttcggtcctccagttagtgttacccaaccttcaacctgcccatggctagatcaccgggtttcgggtctataccctgcaacttaacgcccagttaagactcggtttcccttcggctcccctattcggttaaccttgctacagaatataagtcgctgacccattatacaaaaggtacgcagtcacacgcctaagcgtgctcccactgcttgtacgtacacggtttcaggttctttttcactcccctcgccggggttcttttcgcctttccctcacggtactggttcactatcggtcagtcaggagtatttagccttggaggatggtccccccatattcagacaggataccacgtgtcccgccctactcatcgagctcacagcatgtgcatttttgtgtacggggctgtcaccctgtatcgcgcgcctttccagacgcttccactaacacacacactgattcaggctctgggctgctccccgttcgctcgccgctactgggggaatctcggttgatttcttttcctcggggtacttagatgtttcagttcccccggttcgcctcattaacctatggattcagttaatgatagtgtgtcgaaacacactgggtttccccattcggaaatcgccggttataacggttcatatcaccttaccgacgcttatcgcagattagcacgtccttcatcgcctctgactgccagggcatccaccgtgtacgcttagtcgcttaacctcacaacccgaagatgtttcacttcagagttgcgaaaatttgagagactcacgaacaactttcattgttcagtgtttcaattttcagcttgatccagatttttaaagagcaaatatatcaaacaagacttaacagtctgttttgagatattgaggtcggcgactttcactcacaaaccagcaagtggcgtcccctaggggattcgaacccctgttaccgccgtgaaagggcggtgtcctgggcctctagacgaaggggacacgaaaattgcttatcacgcgttgcgtgatattttcgtgtagggtgagctttcattaatagaaagcgaacggccttattctcttcagcctcactcccaacgcgtaaacgccttgctattcacttttcatcagacaatctgtgtgagcactgcaaagtacgcttctttaaggtaaggaggtgatccaaccgcaggttcccctacggttaccttgttacgacttcaccccagtcatgaatcacaaagtggtaagcgccctcccgaaggttaagctacctacttcttttgcaacccactcccatggtgtgacgggcggtgtgtacaaggcccgggaacgtattcaccgtggcattctgatccacgattactagcgattccgacttcatggagtcgagttgcagactccaatccggactacgacgcactttatgaggtccgcttgctctcgcgaggtcgcttctctttgtatgcgccattgtagcacgtgtgtagccctggtcgtaagggccatgatgacttgacgtcatccccaccttcctccagtttatcactggcagtctcctttgagttcccggccggaccgctggcaacaaaggataagggttgcgctcgttgcgggacttaacccaacatttcacaacacgagctgacgacagccatgcagcacctgtctcacggttcccgaaggcacattctcatctctgaaaacttccgtggatgtcaagaccaggtaaggttcttcgcgttgcatcgaattaaaccacatgctccaccgcttgtgcgggcccccgtcaattcatttgagttttaaccttgcggccgtactccccaggcggtcgacttaacgcgttagctccggaagccacgcctcaagggcacaacctccaagtcgacatcgtttacggcgtggactaccagggtatctaatcctgtttgctccccacgctttcgcacctgagcgtcagtcttcgtccagggggccgccttcgccaccggtattcctccagatctctacgcatttcaccgctacacctggaattctacccccctctacgagactcaagcttgccagtatcagatgcagttcccaggttgagcccggggatttcacatctgacttaacaaaccgcctgcgtgcgctttacgcccagtaattccgattaacgcttgcaccctccgtattaccgcggctgctggcacggagttagccggtgcttcttctgcgggtaacgtcaatgagcaaaggtattaactttactcccttcctccccgctgaaagtactttacaacccgaaggccttcttcatacacgcggcatggctgcatcaggcttgcgcccattgtgcaatattccccactgctgcctcccgtaggagtctggaccgtgtctcagttccagtgtggctggtcatcctctcagaccagctagggatcgtcgccttggtgagccgttaccccaccaacaagctaatcccatctgggcacatccgatggcaagaggcccgaaggtccccctctttggtcttgcgacattatgcggtattagctaccgtttccagtagttatccccctccatcaggcagcttcccagacattactcacccgtccgccactcgtcagcgaagcagcaagctgcttcctgttaccgttcgacttgcatgtgttaggcctgccgccagcgttcaatctgagccatgatcaaactcttcaatttaaaagtttgatgctcaaagaattaaacttcgtaatgaattacgtgttcactcttgagacttggtattcatttttcgtcttgcgacgttaagaatccgtatcttcgagtgcccacacagattgtctgataaattgttaaagagcagtgccgcttcgctttttctcagcggcgcggggtgtgcataatacgccttcccgctacagagtcaagcatttctttgcttttctctgttgagattctcaggagaaccccgccgacccggcggcgtgtttgccgttgttccgtgtcagtggtggcgcattatagggagttattccggcctgacaagcgaaaaatataaaaactttatcgttcgctcacttttcaggcaaaacatcttaaatatagtcttttccgtctaacttatagacaaaaacgagccccgaagggctcgttttatcatttactggacggcgacaatccggtcttcattaacttccaggcgaatcactttacccggaaccaattcaccagacagtatttgctgtgccagcgggttttcgatctgctgctgaattgcacgtttcagaggacgtgcaccatagaccggatcgtaaccgttctcgctcagcagtttcagcgcctcgtcagaaatgtggatttcataaccacgttcttccagacgtttgtacagacgtttcaactgaatctgcgcaatgctggcaatgtgctgttcacccagcggatggaagaccaccacttcatcgatacggttaatgaattccggacggaagttatggcttaccacaccgagcaccagctctttcatgtgcgcataatccagttcaccgaagcgttcctgaatcagatcggaaccgaggttagaggtcataatgacgaccgtattacggaagtcgaccgttctcccttgcccgtcagtcagacgcccatcatccagtacctgcaacagaatgttgaagacatccggatgcgctttttccacttcatccagcaggatgacggaatacggacgacgacgcaccgcttcggtcaggtagccaccttcttcataaccgacatatcccggaggcgcaccaaccaaacgagacacgctgtgtttctccataaactcggacatatcgatacggaccatcgcctcgtcgctatcaaacataaagttcgccagcgccttacaaagctctgttttccccacaccagttgggccgaggaacaggaaactaccaatcgggcgatttggatccgccagccccgcacggctacgacgaatagcgttagataccgcatcaaccgcttcgttctgaccaattacgcgatggtgcagttcttgctccatacgcagcagtttttcgcgctcgctttccatcatgcgagaaaccggaatccccgtccaacgcgccagcacttcagcaatttcggcgtcggtcactttattacgcaacagacgcatagttttgccttcgagctgcgttgcggcttccagttgcttttccagttccgggattttgccgtattgcagttcagacatccgcgccaggtcccccacacggcgagcctgttcaatagcgattttcgcctgttccagttccgctttaatggtctgcgtaccagaaaggcttgccttctctgctttccactcttcttctaactcggagtactgacgttctttgtcgctcagttcttcgttgagcatatccagacgttttttactggcttcatcagactctttcattaacgcctgttgttccagtttgagctggatgatacgacgatcgagtcggtcgagttcttctggtttactgtcaatctgcatacgaatgctggatgctgcttcatcgatcaggtcgatggctttatccggcagctgacggtcagcaatgtagcgatgagacaacgtcgccgctgcaacaattgccgggtcagtaatttgcacatggtggtgcaattcgtaacgttctttcaggccacgcagaatcgcaatggtatcttcaacagaaggctcggcaacaaacactttctggaaacgacgttccagcgcagcatctttttcaatgtactggcgatattcgtcaagcgtcgtggcacctacgcagtgcaattcaccacgcgccagcgccggtttcagcatgtttccggcgtccattgcgccatcggctttacccgcgccgaccatggtatgtaattcgtcgataaataggatgacgttgccttcctgtttggcaagatcgttaagcacgccttttaaacgttcttcaaactcaccgcgatatttcgccccagccaccagcgcgcccatatccagcgccagtacccggcggcctttcaacccttccggcacttcgccgttgataatacgctgcgccagaccttcaacgatggcagttttaccgacgccgggttcaccaatcagtaccgggttatttttagtacgacgttgcagcacctgaatggtacggcgaatttcttcatcacgaccaatcaccggatcgagtttgccctgttcggctcgttcggtaaggtcgatggtatattttttcaaagcctgacgttggtcttcagcaccttgatcgttcacgctttcacctccacgcatttgttcaatcgcttgagtaatgttggcggtggtcgcccctgctgctttcaggatgtcggccagcgtgccgcgagactcaagtgccgccagaacgaacagttcactgctgataaagttatcaccacgtttttgcgccagcttgtcgcaaagattaagaacgcgcaccagatcctgacttggctggacatcaccaccagtaccttcaacctgcggtaaacgatttaatgcctgattgatatctgtgcgcaactggccagcatttatgccagcggatgttaataaaggactaacgctacccccttcctgattcagcagggcgctcattaaatgaagtggttcgataaattggttgtcgtgcccgagtgcaagactttgggcatcggcaagagcaagctggaatttattagtaagacgatccagacgcataactcctcccataacggatcaaagttgctactggagattaaatgaggtcatccctcaattattcaaggttattgaccagattaatgtgaaaagaaaatcacgcgtaccggatcgtcttgattctttaggttatatcagccaaatgaaacttgccatacgaccggtggtcttgtcgcgacgataagagaagaaagtctcattttccgtatatgtacaacggtcgccgccgaaaatttgctcaacacccacgttcgccagacgctgccgggcaagctgataaatatccgccagatacttatcaccatgctgaatgaaagctgcacttgctttagcgtctactgccataaacgcctcgcgaacctccccccccacttcgaacgcgcgtggaccaattgccggccctaaccaggcgagaatattttccggattatcagcaaaacaggaaaccgtctcttccagcacgcctgcgcacagtccacgccagccagcatgagcggcggcgacttccgttcccgctcgattgcaaaacagcacagggaggcagtcggcagtcatcactgcgcaaaccgtgccgggcgtattgctataagaggcatccgcccgtttactggcataaggttcgccagtgagcttaagcacatctttgccgtgtacctgctcaagccagaccggtttagaaggcaaattgcccgcagcaaaaagtcgcttgcgattctcctcaacgtgatccgggttatcgccacaatgggcaccgaggttgagactgtcatacgggggcaagctcacgccgccgatacgagtggagctacaggccgcaacaccttttggctgcggccactgcgggacaatcagcttactcataaccagtccacttcatccttatgttcttcgaaatcggcgcgcatcacctcaatcagctccaccatatcttgtggaataggcgcatgccattccatttcgatgccggagatcgggtgataaagacgcagcatggttgcatgtagcgcctggcggtcaaacttacgcagcgtggagataaatgcttcgctagcaccttttggcggacgcggacggccaccataaaccggatcgcccaccagcggatgagtgatatgggccatatgcacgcggatctggtgcgtacgtccagtttccagacgcaaccgcagacgcgtgtgcacacggaagtgttccatgatgcgatagtgagtcaccgctggtttgcccatcggatgcaccgccatatgggtacgtttggtcgggtggcgactgattggctcgtccaccgtgccacctgcggtcatatgaccaatcgccaccgcttcatactcacgagtaatttcacgccgttgcaaagattcgactaaacgcgtctgagccggaacggtttttgccacaaccatcaggccagtggtgtctttatccagacgatggacgatgcccgcacgcggtacatcggcaatgggtggatagtaatgaagcaacgcattcagtaccgtgccatccgggttacccgcgccaggatgtaccaccaggtcgcgcggtttattaatgataataatgtcttcatcttcatagacgatatccagcgggatatcctgcggttcaaaacgcgcttcttcttcaatctcagcgttgatggcaacctgctcgccacccaatactttttctttcggcttatcacaaactttgccgttaaccagcactcgctggtcgaggatccattcttttattcggctacgactataatccgggaacatttcggccaaagcctgatctaagcgttgaccgagttggttttcggacaccgttgcagtgagctgtactcgttgtgccatatatactgcttcttcgtttatcgttggggttttacggctttgccgtttaatatagtgtgctattgtagctggtcttaaccgggagcaggaacagagaatctcccgtattacattttgaggaaagtcaaaacgtcatgacgcgcatgaaatatctggtggcagccgccacactaagcctgtttttggcgggttgcagcgggagtaaggaagaagtacctgataatccgccaaatgaaatttacgcgactgcacaacaaaagctgcaggacggtaactggagacaggcaataacgcaactggaagcgttagataatcgctatccgtttggtccgtatagccagcaggtgcagctggatctcatctacgcctactataaaaacgccgatttgccgttagcacaggctgccatcgatcgttttattcgccttaacccgacccatccgaatatcgattatgtcatgtacatgcgtggcctgaccaatatggcgctggatgacagtgcgctgcaagggttctttggcgtcgatcgtagcgatcgcgatcctcaacatgcacgagctgcgtttagtgacttttccaaactggtgcgcggctatccgaacagtcagtacaccaccgatgccaccaaacgtctggtattcctgaaagatcgtctggcgaaatatgaatactccgtggccgagtactatacagaacgtggcgcatgggttgccgtcgttaaccgcgtagaaggcatgttgcgcgactacccggatacccaggctacgcgtgatgcgctgccgctgatggaaaatgcataccgtcagatgcagatgaatgcgcaagctgaaaaagtagcgaaaatcatcgccgcaaacagcagcaatacataacagaaacctgaaacacaaaacggcagcccttgagctgccgtttttttattctgtcagttgtgaaactgaagcgatttagtcgctatcgatctcatcaaatatggctcgctttgagatattcctcaagtaaaaaaacatctcttcctgcgatttctcacaaaaaagattcgttgacaaaaagtgacaaaattatgagattttcatcacacattttgacatcaggaacggtatgctgaattcaccaagacgggaagacaagaggtaaaatttatgacaatgaacattaccagcaaacaaatggaaattactccggccatccgccaacatgtcgcagaccgtctcgccaaactggaaaaatggcaaacacatctgattaatccacatatcattctgtccaaagagccacaagggtttgttgctgacgccacaatcaatacacctaacggcgttctggttgccagtggtaaacatgaagatatgtacaccgcaattaacgaattgatcaacaagctggaacggcagctcaataaactgcagcacaaaggcgaagcacgtcgtgccgcaacaagcgtgaaagacgccaacttcgtcgaagaagttgaagaagagtaatcctttatattgagtgtatcgccaacgcgccttcgggcgcgttttttgttgacagcgtgaaaacagtacgggtactgtactaaagtcacttaaggaaacaaacatgaaacacataccgtttttcttcgcattcttttttaccttcccctgaatgggaggcgtttcgtcgtgtgaaacagaatgcgaagacgaacaataaggcctcccaaatcggggggccttttttattgataacaaaaaggcaacactatgacaagcgaaaacccgttactggcgctgcgagagaaaatcagcgcgctggatgaaaaattattagcgttactggcagaacggcgcgaactggccgtcgaggtgggaaaagccaaactgctcagccatcgcccggtacgtgatattgatcgtgaacgcgatttgctggaaagattaattacgctcggtaaagcgcaccatctggacgcccattacattactcgcctgttccagctcatcattgaagattccgtattaactcagcaggctttgctccaacaacatctcaataaaattaatccgcacagtgcacgcatcgcttttctcggccccaaaggttcttattcccatcttgcggcgcgccagtatgctgcccgtcactttgagcaattcattgaaagtggctgcgccaaatttgccgatatttttaatcaggtggaaaccggccaggccgactatgccgtcgtaccgattgaaaataccagctccggtgccataaacgacgtttacgatctgctgcaacataccagcttgagcattgttggcgagatgacgttaactatcgaccattgtttgttggtctccggcactactgatttatccaccatcaatacggtctacagccatccgcagccattccagcaatgcagcaaattccttaatcgttatccgcactggaagattgaatataccgaaagtacgtctgcggcaatggaaaaggttgcacaggcaaaaagtccgcatgttgctgcgttgggaagcgaagctggcggcactttgtacggtttgcaggtactggagcgtattgaagcaaatcagcgacaaaacttcacccgatttgtggtgttggcgcgtaaagccattaacgtgtctgatcaggttccggcgaaaaccacgttgttaatggcgaccgggcaacaagccggtgcgctggttgaagcgttgctggtactgcgcaaccacaatctgattatgacccgtctggaaagtcgcccgattcacggtaatccatgggaagagatgttctatctggatattcaggccaatcttgaaagtgcggaaatgcaaaaagcattgaaagagttaggggaaatcacccgtagtatgaaggtattgggctgttacccaagtgagaacgtagtgcctgttgatccaacctgatgaaaaggtgccggatgatgtgaatcatccggcactggattattactggcgattgtcattcgcctgacgcaataacacgcggctttcactctgaaaacgctgtgcgtaatcgccgaaccagtgctccaccttgcggaaactgtcaataaacgcctgcttatcgccctgctccagcaactcaatcgcctcgccgaaacgcttatagtaacgtttgattaacgccagattacgctcactgctcataatgatgtcggcataaagctgcggatcctgagcaaacagtcgcccgaccatcgccagctcaaggcggtaaatcgggctagagagcgccagaagttgctcaagctgaacattttcttctgccaggtgcagcccgtaagcaaaagtagcaaagtggcgcagtgcctgaataaacgccatattctgatcgtgctcgacggcgctaatacgatgcagccgagcgccccagacctgaatttgctccagaaaccattggtatgcttccggtttacgtccatcacaccagaccacaacttgctttgccaggctaccgctgtccggaccgaacatcgggtgtagccccagcaccggaccatcatgcgccaccagcatggcctgtaatggcccatttttcacacttgccagatcgaccagaatacaatctttcggtaaaggcggtaatttgccaataacttgctcagtaacgtggattggcacactaacaatcaccattccggcatcggcaacaatatcagccgctcgatcccagtcatgttgctccagaatccgcacctgataaccgctgagggtcagcatcttctcgaacaggcgtcccatctgaccgccaccgccgacgataaccaccggacgcagactcggacaaagtgttttaaatcctttgtcgttttcactggagtaagattcacgcatcacccgacgcaaaacatcctcaatcagatctggcggtacacccagagcttccgcctctgcacgacggctggccaacatagatgcctcgcgctccggaacataaataggcagtccaaagcggcttttcacctcgcccacttcagcaaccagttccagacgcttcgctaataaattcagcagcgctttatcgacttcatcaatttgatcgcgtaatgcggtcaattcagcaaccataataaacctcttaagccacgcgagccgtcagctgcccgttcagatcctgatgaatttcacgcagcaaggcatcggtcatttcccagctaatgcaggcatcggttacggatacaccgtatttcatttcactgcgcggttgctcggaagactgattgccctcgtggatattactttcgatcatcagaccaataatactgcgattgccatctttgatttgagcaaccacggattctgccaccgcaggctgacggcgataatctttattggaattaccgtggctgcaatctaccatcagagacgggcgcagtcccgcctgttccatctctttttcacattgcgcaacatccgcagggctatagttcggcgctttaccaccgcgcaggatcacatggccgtccggattcccctgagtttgtagcaacgcaacctgccctgcctggttaatgccaacaaaacggtgcggctgggcggcggcgcgcatagcgttaattgctgttgccagactgccgtcggtgccgtttttaaaaccaaccggcatggaaagcccggaggccatttcacggtgagtttggctttccgttgtacgagcaccaattgcactccagctaaacagatcgcccaggtattgcgggctattcggatctaacgcttccgtcgccagtggcagtcccatattcaccagctcaagcagcaatttacgcgcgatctgcagcccggcttctacatcaaaagagccatccatatggggatcgttaattaaccctttccagccgacagtggtacggggtttttcaaaatagacgcgcattaccagatagaggctatcgctgacctctgcggcaagggctttaaatcgacgagcatattccagagcagtttccggatcatgaatggaacaaggaccacatactaccagcagacgaggatcgcgcccggcgataatatcactaatgcttttacggctgtcagcaatctgggcttcttgttgcaggctcaatggaaaagcggccttcagttgttccggagtcattaaaacctgttcgtcggtaatatgtacgttattcagcgcgtctttttgcatgatggcgatcctgtttatgctcgtttgcgatagttgatcctcagcgaggatgacgtaacgataacacataaagtaaagttttcaatccatatttcgtacatttttatttacacaggcaatttagtcgcgctttcaacccttacctctgtatagataaatttacactccctttgaaaacaatccgctatgctttgaaaaaggagaaagaaatgatgaaaaagtttatcgcccccttgttggctttactggttagcggatgtcagattgatccttatactcacgcgccaaccttgaccagcaccgactggtatgatgtcggtatggaagatgcgataagcggcagcgccataaaagatgacgatgcatttagcgatagtcaggcggatcgcggtctataccttaaaggatatgccgaaggacaaaagaaaacttgccagaccgattttacttatgcccgaggactttccggtaaaagctttcctgccagctgcaacaatgttgaaaatgccagccaactgcatgaagtaggcaaaaaggggctgatgaaaatgccagcacaatacgattaaattaattaaaaccccacaaataaattaaacataagattttactcattgtgttttatttctcacattgatgacggtcgcatgaaaaaatgatattttaatgagcattctgaaaaaatatcgatgcatttcgagcgaagatggtggggatccctgaatgcgtttttctcaccgactgttcttacttctgattctcctgctgacgggagcaccaatactcgctcaggagccttctgacgttgcgaaaaacgtgcgtatgatggtttccggtattgtcagttacacccgctggcctgcgctaagtgggccaccaaagttatgtatctttagttctagtcgttttagtaccgccctacaagagaatgccgcgacatctttgccttatctgcctgtcatcattcacactcaacaagaggcgatgattagtggctgcaatggtttttattttggcaacgagagtccgacattccagatggaattaaccgaacaatatccgagtaaggcgttattattaattgccgaacaaaataccgagtgcattattggtagcgccttttgtctgatcatccacaataatgacgtcagatttgccgtaaacctggatgccttaagccgtagcggtgtaaaggtcaacccggatgtcttaatgctcgcacggaagaaaaatgatggataacgataattctcttaataagcgccccacgtttaaaagagcattacgcaacatcagtatgaccagcatatttatcactatgatgctgatctggttgctgctttccgtgaccagcgtgctgaccctgaaacagtacgcgcaaaaaaacctggcactgacagcagcaacaatgacttacagtctggaagcagctgtcgtttttgccgatggccctgcagcaactgaaacactggcagcgctgggccagcaagggcaatttagtactgcagaagtacgtgataagcagcaaaatattctggcatcctggcattacacccgtaaggatccaggcgatactttcagtaatttcataagccactggctcttccctgcccccatcattcagccgattcgtcacaatggtgaaaccattggcgaagtacgcttaaccgctcgcgacagtagtatcagccattttatctggtttagcctcgccgtactgaccggttgtattctgctggcaagtggcatcgcaattaccctcacccgccatttgcacaatggcctggtagaagcgctgaaaaatatcaccgatgtcgtacatgatgtgcgttccaaccgcaatttttcccgacgagttagcgaagaacgtatcgctgagtttcaccgcttcgctctcgacttcaacagtctgctggatgaaatggaagagtggcagcttcgtttacaggctaaaaatgcgcagcttctacgtaccgcgctacatgacccattaaccgggctggctaaccgcgcagcgtttcgtagcggcatcaacacgttgatgaacaattccgatgcccgaaaaacgagcgcgttactatttcttgatggcgataatttcaaatacatcaatgatacctggggtcatgcgacgggcgatagagtcttgattgaaatcgcaaaacggttagctgaatttggcgggctgcgacataaagcataccgcctgggcggcgatgaattcgctatggtgctctatgatgtacagagcgaatctgaagtgcagcagatatgtagtgcactgacacaaatctttaatctcccgtttgatcttcataatggccatcagaccaccatgacattaagcattggttacgcgatgaccattgagcacgcctctgcggaaaaattacaagagcttgccgatcacaatatgtatcaggccaaacaccagcgtgccgaaaagctggtgagataacaaggatatatcgatatgataaagcacctggtagcacccctggttttcaccagtctaatactgactggctgccagtcccctcagggaaagtttactcctgagcaagtcgccgctatgcaatcttatggatttactgaatccgccggcgactggagcctgggcttaagtgatgccattctgttcgcaaaaaatgactacaaattgctcccggaaagccagcaacagatccaaaccatggcagctaaattggccagcacagggctaacacatgcccgtatggatggacacaccgataactatggtgaagacagttacaacgaaggcttaagtttgaaacgggcgaatgtcgtggccgatgcatgggctatgggtggacaaattccacgcagcaatctcaccacacagggtttaggaaaaaaatatcccatagccagtaacaagaccgcccagggccgcgccgagaaccgccgcgtcgcagtggtgattactaccccttaaaacaccagcaaacagataaaaaagggccagccaattggccagcccttcttaacaggatgtcgcttaagcgaaatcttagttaagacgctctttgatacgagcagccttaccagtacgctcacgcaggtagtacagtttagctttacgaacagcaccacgacgtttgacagaaatgctgtcaactaccggagagtgagtctggaagacacgctcaacgccttcgccgttggaaattttacgaacagtgaatgcagagtgcagaccgcggttacgaatagcgataaccacgccctcgaatgcctgcagacgttttttggaaccttcaacaacccatactttcacttccacggtatcacccggacggaaggaaggtacgtcctgcttcatctgctcttgttcaagttgcttaataatgttgctcataatttaatctcttatcctgggtaaactgatatctcgggggcttacgccatcccatcatgtttatgttgctgttgtgcgtgttccgttttgaactccgccagcaaccttgcttgctcttcagtcagagccaggttttccagaagttcaggtcttctaagccaggtacggcccaggctctgtttcaaacgccagcgacgtatctcggcatggttgccgctcagtaacactggcggaacttccatcccttctaacacctcaggccgcgtatagtgcgggcaatccagcaatccttcagcaaaggaatcttccgttgcgctggcttcatgtcccagtactcccggaataaaccgggaaacggagtcaatcagcgtcattgctggtaactcaccaccactgagaacgtaatcgccgatactccattcttcgtcaatttcggtttggatcacgcgctcatctataccttcgtagcgaccgcacaccagaatcaatttttgattcgttgccagttcgctgacgcccgcttgatcaagcttgcgtccctgtggactcagataaatcacctttgcgccttcacccgccgcggcttttgctgcatgaatggcgtcccgcaagggttgcaccatcattaacatccccggtccgccgccgtaaggacgatcgtccacggtacggtgccggtcatgcgtgaagtcgcgaggactccagctctggatgctcagcaggccatttttaactgcccggccagttaccccgtaatcggtaattgcgcggaacatttcaggaaacaggctaattatgccaatccacatagcgccgtcttttaccgtttatccggtggtttaaaaaccaggatcccaatctacttcgatactacgagtagtgagatcgactttcttgataacctgcccatcgaggaacggtacgagacgttccttgataccaaacgcatctttcaggtttgccttaatgacgagaacgtcattagatccggtttccatcatatcgacgactttaccgagatcgtagccttcagtggttactacctggcagcccatcaggtctttccagtagtagtccccctcttcaagctgaggcagctggctactatccacgacaatttcacaattcgtcagcaggttcgccgcatcacgatcgtcaacgcctttcagcttgatgatcatgtcctgattgtggtgcttccagctttccagctggacttgctgccactgacccgccttctggataaaccagggctgatagtcaaaaatgctttcggcgtcttcggtggaagaaaacactctgagccacccacgaataccgtaagagctacccatttttcccaaaacgatgggatcaacaggtgcttgcgcggtgagttgtttgctcatcatgaccaccgtgacagattaagctgctttgtttacttctttgatcagcgcagcaacgcgatcagaaatagttgcgccctggccaacccagtgagcgatgcgatccagatccaggcgagtgccttcttctttttcgctagcgattgggttgaagaaaccaacgcgctcgatgaagcgaccgttgcgtgcattacggctgtcagcgacaacaacctggtagaacggacgctttttagcgccgtgacgtgctaaacgaatagttaccataacatcctcttgtgtgaataaaacaaccggaccccatcgaggaacggagtccggtgtcatattaaaagcccgaaaattttactcatttttgcgggaattgcaatcaacagttgctaactctgctgtaaaaggccgtcggcggtgcagccagtttggtgccggagtgcgcgcagtcaccggagcgtacacgcagtacgtgaggatgacgagcacatcccggtgccaaaatggcaaacaagccaggccgattagcgaccagggaagcctgggggcatcatacccttcatgcttctcatcatcttcgccattccgcccttcttcattttcttcatcatgcgctgcatgtcgtcgaactgtttcagaagacggttaacgtcctgcacctgcataccgcaaccggcagcaatacggcgtttacggctacctttgatgatttctggcttagcgcgctctttcatcgtcatgctgttgatgatggcttccatacgcaccagcactttatcgtccatctgactcttgacgttatccgggatctgccccatgcccggcagcttgcccatcagactagccatgccgcccatatttttcatctggcgcagctgctcaagaaagtcgttgagatcgaagccgtcaccttttttcagcttgctggctaatttctctgcctgcgcgcggtcaactttgctttcgatatcttcgatcaggctcagtacgtcgcccatgccgagaatacggctcgcgatgcggtccggatggaacggctccagcgcctcagttttctcgccaacaccgaggaacttgatcggtttgccagtgatgtgacgaatagagagcgccgcaccgccgcgggcatcgccgtccactttggtcaacactacgccggtaagcggtaacgcttcattgaatgcttttgccgtattggccgcatcctgaccggtcatggcgtcaaccacaaacagggtttcaaccgggttaatgctcgcatggacttgtttgatctcgtccatcatcgcttcgtcaacgtgcagacgaccagcggtatccaccagcagcacgtcgtagaatttcagtttggcttctttcagcgccgcgttaacgatatctaccggcttctgaccaacatcagaagggaagaaatcaacgcccacctgctctgccagcgtctcaagctgtttgattgccgccgggcgataaacgtcggcagaaaccaccagcactttcttcttgtgcttctcgcgcaggaacttaccgagtttaccaacgctggttgttttaccggcaccttgcaggcccgccatcagtacgaccgcaggcggttgcgcagccaggttcagggtctggttctcttcgcccatcgccgcaaccagttcgttacggactattttgacgaactcctgccccggcgtcaggctcttattaacttcatgaccaaccgctttctcttttacgcgattgataaactcacgcactaccggcagagctacgtccgcctccagcagcgccatgcgcacttcgcgcagcgtatcttttacgttgtcttcagtgaggcgtccacggccactgatattgcgcagcgtgcggctcaaacgatcggttaaattatcaaacattgtctctcgcctggggtggaaacggttggccgcaatcgcgacacatcatcagtattttgccgcagtataacatgaaggcgtctttgttgttatgcaacggttggagcagcgtagtcctgacgctatactgcttctctttcttattgctcaaactgtcgacatcactatgcccgtttttgctctgctcgcgcttgtcgcctactccgtcagtcttgcgctgattgttcccggtctgctgcaaaaaaacggcggctggcggcgcatggctattatttctgcggtcattgcgctggtctgccacgcaatcgctctggaagcccgcatcctgcccgacggtgatagcggacaaaacctcagcctgctgaacgttggtagtttggtcagtttgatgatctgtacggtaatgaccattgtggcttctcgcaatcgtggctggctgctgctacccattgtctatgcctttgcgcttatcaacctggcgctggcaaccttcatgcccaatgaatacatcacccatctggaagctacgcctgggatgctggtgcacattggcttaagcctcttttcctatgccacgctaattatcgccgccctgtacgcgctgcaactggcgtggattgattaccaactgaagaacaagaagctggcgtttaaccaggaaatgccgccattgatgagtatcgagcgtaaaatgttccacatcacgcagattggcgtggtgctgctaacgctcacgctttgcactggcctgttctacatgcacaacttatttagcatggaaaatatcgacaaggctgtgctctctatcgtggcgtggtttgtctatattgtgctgctgtggggacattatcatgaaggatggcgtggacgccgcgtcgtctggtttaacgttgcgggcgcggtaattctgacactggcctacttcggcagccgaattgtccagcagttaatcagctaaacccagaaaaggagtttcccctggaacacatttctactactacgttgatcattattctgatcatcatggtggtcatttcagcctatttttccgggtccgaaaccggaatgatgaccctcaaccgctatcgtctgcgacatatggcgaaacagggtaatcgcagcgccaaacgcgtcgaaaaattgctgcgtaagccagaccgcctgataagcctggtgttaatcggcaataacctggtcaatattcttgcctccgcgctcggcactattgttgggatgcgtttgtacggcgatgcgggcgtggcaattgcgactggtgtgctgacttttgtcgtactggtatttgctgaggtattgccgaaaaccattgccgcgctgtacccggaaaaagtcgcttatccgagtagttttctgctggctccgctgcaaattttgatgatgccgctggtctggttgctgaatgctatcacccgtatgctgatgcgcatgatgggtatcaaaaccgatatcgtggttagcggctctttgagcaaagaagagttgcgcactatcgtgcacgaaagtcgcagtcaaatttcccgtcgcaatcaggatatgctgctgagcgtgctcgatctggaaaaaatgaccgttgatgacatcatggtgccgcgcagtgaaattatcggtattgatatcaacgatgactggaaaagcattctgcgccaactctcccacagtcctcacgggcgcatcgtgctctaccgtgatagcctggacgacgccatcagtatgctgcgagtacgtgaagcctggcggttgatgagcgagaaaaaagagttcaccaaagaaaccatgctgcgcgccgcggacgagatctattttgtgccggaaggtacgccgctcagcacgcagttggtaaagtttcagcgcaacaaaaagaaagtcggcctggtcgtcaacgagtatggagacattcaggggctggtgacggttgaagatattctggaagagattgtcggcgatttcactacgagcatgagcccaacacttgccgaagaggtcacgccgcaaaacgacggtagcgtgattatcgatggcaccgccaacgtgcgggaaatcaacaaagcctttaactggcatctaccggaagatgatgcccgcacggttaatggcgtcattcttgaggcactggaagagatccctgtcgcaggcacccgcgtgcgtattggcgagtacgatatcgatattctcgacgtacaggacaatatgattaagcaggtaaaagtttttcctgtgaaaccgctgcgcgagagtgtggcggagtaacgaaaacggcccggcattcgcatgcagggccgtgaattattacgaaagcagaaattaagcttttgctttcgctacagtaaccatcgccgcacgaatcgtacgaccattcagcgtataacccttctgcataatgcccagtacgttacctggcgcaacgtcatcagattccaccattgcgatggcctgatgcacattcgggtccagtgggacgttagtttcggcgatcacttcaacgccaaacttacgcacaacatccagcatgctcttcagcgtcagctcaatgccttcaaccatcgcagacatatccgggttagctttatcagccacttccagcgcacgatccaggctatcaatcaccggcagcaattcgttgatgaatttctccagcgcgaatttgtgggctttttcaatatccagttcagtacgacgacgcaggttttccatttcggcttttacacgcaaaatgccgtcacgttcacgggtctgggcttcagccagctgagcttcgagattcgcaactttttcatcgcgcggatccacctgctcagcagaagcttctggctcaactgcctcaatctcttcgtgctgatccatgataatttcttccggggcttgcccctcaggcgttttctgttctttactactcatgaatttctccgcgtttttttcgcattcatctcgctaacttcgcttattatggggatcagtttcagggtttcaagggaagcactcacattgtcatcaatcttcgcaacaaggacctcggaaaaatgaataatcatttcaagtgtattggcattgtgggacacccacggcaccccactgcactgacaacacatgaaatgctctaccgctggctgtgcacaaaaggttacgaggtcatcgttgagcaacaaatcgctcacgaactgcaactgaagaatgtgaaaactggcacgctcgcggagattgggcaactagctgatctcgcggtagtcgttggtggcgacggtaatatgctgggcgcggcacgcacactcgcccgttacgatattaaagttattggaatcaaccgtggcaacctgggtttcctgactgaccttgaccccgataacgcccagcaacagttagccgatgtgctggaaggccactacatcagcgagaaacgttttttgctggaagcgcaagtctgtcagcaagattgccagaaacgcatcagcaccgcgataaatgaagtggtgcttcatccaggcaaagtggcgcatatgattgagttcgaagtgtatatcgacgagatctttgcgttttctcagcgatctgatggactaattattagcacgccaacaggctccaccgcctattccctctctgcaggcggtcctattctgaccccctctctggatgcgattaccctggtgcccatgttcccgcatacgttgagtgcacgaccactggtcataaacagcagcagcacgatccgtctgcgttttagccatcgccgtaacgacctggaaatcagttgcgacagccagatagcactgccgattcaggaaggtgaagatgtcctgattcgtcgctgtgattaccatctgaatctgattcatccgaaagattacagttatttcaacacattaagcaccaagctcggctggagtaaaaaattattctaattttacgccagcctctttactgtatataaaaccagtttatactgtacacaataacagtaatggtttttcatacaggaaaacgactatgttggcacaactgaccatcagcaactttgctatcgttcgtgagcttgagattgattttcatagcggcatgaccgtaataactggcgagaccggcgcgggtaaatctattgcaatagatgccctcggtctttgtctcggtggtcgcgctgaagccgacatggtgcgtaccggcgctgctcgcgctgacctgtgcgcccgtttttctctgaaagatacgccagcggctctgcgctggctggaagaaaaccagcttgaagacgggcatgaatgtttgcttcgtcgcgtgatcagcagcgatggtcgctcccgtggtttcatcaacggtacagctgttcctctgagtcaactgcgcgaactgggtcagttgctgattcagatccatggtcagcacgctcatcaattactcaccaaacctgagcaccaaaaattcctgcttgatggctatgccaatgaaacctctctactgcaggaaatgaccgcacgttatcagttgtggcatcaaagctgccgtgacctcgcgcatcatcaacagttaagtcaggaacgcgccgcccgtgcggaactgctgcaataccaattaaaagaacttaacgaatttaatccgcagcccggagagtttgaacaaatcgacgaagagtacaaacgtctggcgaacagcggtcaattgctgaccaccagccagaatgcattggcattaatggccgacggtgaagacgcaaacctgcaaagtcagctttacacggctaaacaactggtgagcgaattgattggcatggacagcaaactgtccggcgtacttgatatgctggaagaagctaccatccagattgctgaagccagcgatgaactgcgccactactgcgatcgtctggatctcgatcccaaccgactatttgaacttgaacagcgcatcagtaaacagattagcctggcacgtaaacatcacgtcagccctgaggcattgccacagtattaccagagcctactggaagaacagcagcaactggacgatcaggccgacagtcaagaaacgcttgcgctggcggtaacgaaacatcatcagcaggcactggaaatcgcgcgcgcattacaccaacaacgccagcaatatgcagaagaacttgcacagctgatcaccgacagtatgcatgcgctcagtatgccgcatgggcagtttacgatcgatgttaaatttgacgagcatcacctgggcgctgacggtgccgatcgtattgagtttcgggtaaccaccaacccaggtcagccaatgcagcctattgccaaagtcgcatccggtggtgaattgtcccgcatcgcactggcaatccaggtcatcacggcgcgtaaaatggaaaccccggcactgatttttgatgaagtggatgtagggattagcggtccaacagcggcagttgtcggcaaactgctgcgtcaactcggcgaaagtactcaggtgatgtgtgttacccacctgccacaagtcgcgggatgtggtcatcaacactattttgtcagcaaagaaaccgatggtgcgatgacagaaacgcatatgcaatccctgaataaaaaagcgcggttacaagagctggcgcgcctgcttggtggcagtgaagtcacacgtaatacactggcgaatgcgaaagaactgcttgcagcgtaaacttttttcctgcttcacggtcagagtaaacagcaaaacgccgtaagaccggaaagcaaaaggttttaaagtgatgaaaggtctattatcatcggcatattacagatgagccacgtactgctcgggcccgaaaaggaatcaaatcactatgcgctgtaaaacgctgactgctgcagcagcagtactattgatgttgaccgcaggctgttccactctggagcgagtggtttaccgtcctgacatcaaccaggggaactatctgaccgctaacgacgtatccaaaatacgtgttggcatgacgcaacaacaagttgcgtacgcattgggtacaccgctgatgtccgatccatttggtacgaatacctggttctatgtcttccgccagcaaccaggtcatgaaggtgtaactcagcaaacgctgacgctgacctttaacagtagcggtgtgttgaccaatattgataacaaacctgcgctgagtggtaactaataataaagttgctctcaaagacgttaaaaaaggtgctcaatgagcaccttttttctgtctgttatttattcgcacttttttctgctcgttgcctgcgaagctctttcggatcggcaatgagagggcgataaatctccacccgatcgccatcatgcacactatcgcttagttttgccggacggctgtaaatgccgactttgtttttagttaaatcgatatcggtacgcaattccagcaagccactggcgcgaatagcttcttcaaccgtcgcgccctcctgcagcgtcactcgctgcaggtactgcttctcaggtagcgcataagccacctcaacggcaattttacctggcactgtaaacctctttcgcacgaaccgtaaaagcctggaccatattagccgccagctctttaaacacgcgaccaaaggcgagttcaatcaacttattggtaaactcaaagtcgagatgaaactcgatacgacacgcctcctggctcagcggcgtaaacttccatccaccaatcaatttcttgaacggcccatccaccagattcataagaatactttggttactggtcaactggttgcgggtagtaaacgttttgctgatcccagccttagagacatctaccgccgcagtcatctgcccaggagtggactccagaatccgacttccggtacaacccggcaaaaactgaggataagactgaacgtcattcactaactgatacatttgctccgcgctgtagggtaccagtgcggtccggctaatctgaggcataacaatttccatcaacaaaaatccaacaaataatatcatttatcctgctgtaaaaaaaacgctatcccggcgctgggtaacatcgggttcatgctaagatagagccttgtcccccgcaggattgatatggggtgttttcgatttcagattaccgatgattcacgacgcttatgacgaagaaaaaagcacataaacctggtagtgcgaccatcgcgcttaacaagcgcgcccgtcacgaatactttatcgaagaagagttcgaagcgggacttgccctgcaaggctgggaagttaaatccctgcgcgcaggaaaagccaatatcagcgacagctacgtccttctgcgtgacggagaggcatttctgtttggcgctaacatcacgccaatggccgtggcctccacgcatgtggtgtgcgatcctacccgtacccgcaagttacttctcaaccagcgcgaactggacagtttgtacggtcgcgtcaatcgagaaggctataccgtagtggcgctctccctgtactggaaaaatgcctggtgcaaagtgaaaatcggcgtcgccaaaggtaagaaacagcacgataaacgtagtgatatcaaagagcgcgaatggcaggtggataaagcacgtatcatgaaaaacgcccaccgttaaacctgcactccaattattgaccagttcctcaccgcgcctccctctccggcggcgcgaatgaacatcttattggctatcacatccgacacaaatgttgccatcccattgcttaatcgaataaaaatcaggctacatgggtgctaaatctttaacgataacgccattgaggctggtcatggcgctcataaatctggtatacttacctttacacattggggctgattctggattcgacgggatttgcgaaacccaaggtgcatgccgaggggcggttggcctcgtaaaaagccgcaaaaaatagtcgcaaacgacgaaaactacgctttagcagcttaataacctgcttagagccctctctccctagcctccgctcttaggacggggatcaagagaggtcaaacccaaaagagatcgcgtggaagccctgcctggggttgaagcgttaaaacttaatcaggctagtttgttagtggcgtgtccgtccgcagctggcaagcgaatgtaaagactgactaagcatgtagtaccgaggatgtaggaatttcggacgcgggttcaactcccgccagctccaccaaaattctccatcggtgattaccagagtcatccgatgaagtcctaagagcccgcacggcgcaagccctgcgggcttttttgtgccctcaatttgtcccgcgaagtccgaagagaactaattaaatccgaaccttttaggcccattgataggcccaacgaaaagctctattgtttacgttgggctaaacgcagggagactccccacctttgaaaacaggatgtagcgatgaaacttaacgacagtaacttattccgccagcaggcgttgattaacggggaatggctggacgccaacaatggtgaagccatcgacgtcaccaatccggcgaacggcgacaagctgggtagcgtgccgaaaatgggcgcggatgaaacccgcgccgctatcgacgccgccaaccgcgccctgcccgcctggcgcgcgctcaccgccaaagaacgcgccaccattctgcgcaactggttcaatttgatgatggagcatcaggacgatttagcgcgcctgatgaccctcgaacagggtaaaccactggccgaagcgaaaggcgaaatcagctacgccgcctcctttattgagtggtttgccgaagaaggcaaacgcatttatggcgacaccattcctggtcatcaggccgataaacgcctgattgttatcaagcagccgattggcgtcaccgcggctatcacgccgtggaacttcccggcggcgatgattacccgcaaagccggtccggcgctggcagcaggctgcaccatggtgctgaagcccgccagtcagacgccgttctctgcgctggcgctggcggagctggcgatccgcgcgggcgttccggctggggtatttaacgtggtcaccggtagcgcgggcgcggtcggtaacgaactgaccagtaacccgctggtgcgcaaactgagctttaccggtagcaccgaaattggccgccagttaatggaacagtgcgcgaaagacatcaagaaagtgagcctggagctgggcggtaacgcgccgtttatcgtctttgacgatgccgacctcgacaaagccgtggaaggcgcgctggccagcaaattccgcaacgccgggcaaacctgcgtctgcgccaaccgcctgtatgtgcaggacggcgtgtatgaccgttttgccgaaaaattgcagcaggcagtgagcaaactgcacatcggcgacgggctggataacggcgtcaccatcgggccgctgatcgatgaaaaagcggtagcaaaagtggaagagcatattgccgatgcgctggagaaaggcgcgcgcgtggtttgcggcggtaaagcgcacgaacgcggcggcaacttcttccagccgaccattctggtggacgttccggccaacgccaaagtgagcaaagaagagacgttcggccccctcgccccgctgttccgctttaaagatgaagctgatgtgattgcgcaagccaatgacaccgagtttggccttgccgcctatttctacgcccgtgatttaagccgcgtcttccgcgtgggcgaagcgctggagtacggcatcgtcggcatcaataccggcattatttccaatgaagtggccccgttcggcggcatcaaagccagcggtctgggtcgtgaaggtagcaagtatggcatcgaagattacttagaaatcaaatatatgtgcatcggtctttaactggagaatgcgaatgaacagcaataaagagttaatgcagcgccgcagtcaggcgattccccgtggcgttgggcaaattcacccgattttcgctgaccgcgcggaaaactgccgggtgtgggacgttgaaggccgtgagtatcttgatttcgcgggcgggattgcggtgctcaataccgggcacctgcatccgaaggtggtggccgcggtggaagcgcagttgaaaaaactgagccacacctgcttccaggtgctggcttacgagccgtatctggagctgtgcgagattatgaatcagaaggtgccgggcgatttcgccaagaaaacgctgctggttacgaccggttccgaagcggtggaaaacgcggtaaaaatcgcccgcgccgccaccaaacgtagcggcaccatcgcttttagcggcgcgtatcacgggcgcacgcattacacgctggcgctgaccggcaaggtgaatccgtactctgcgggcatggggctgatgccgggtcatgtttatcgcgcgctttatccttgcccgctgcacggcataagcgaggatgacgctatcgccagcatccaccggatcttcaaaaatgatgccgcgccggaagatatcgccgccatcgtgattgagccggttcagggcgaaggcggtttctacgccagcagcccagcctttatgcagcgtttacgcgctctgtgtgacgagcacgggatcatgctgattgccgatgaagtgcagagcggcgcggggcgtaccggcacgctgtttgcgatggagcagatgggcgttgcgccggatcttaccacctttgcgaaaagcatcgcgggcggcttcccgctggcgggcgtcaccgggcgcgcggaagtaatggatgccgtcgctccaggcggtctgggcggcacctatgcgggtaacccgattgcctgcgtggctgcgctggaagtgttgaaggtgtttgagcaggaaaatctgctgcaaaaagccaacgatctggggcagaagttgaaagacggattgctggcgatagccgaaaaacacccggagatcggcgacgtacgcgggctgggggcgatgatcgccattgagctgtttgaagacggcgatcacaacaagccggacgccaaactcaccgccgagatcgtggctcgcgcccgcgataaaggcctgattcttctctcctgcggcccgtattacaacgtgctgcgcatccttgtaccgctcaccattgaagacgctcagatccgtcagggtctggagatcatcagccagtgttttgatgaggcgaagcagtaacgccgctcctatgccggaggcgacgctgcgcgtcttgtccggcctacggggatccaggtcggataaggcgtttacgccgcatccgacaatctgtacgtgaacaggaagaaatctatgttggccgggtaaggcggagccgctctccggcaaaaagaatcaataacaattatacgcgtgacccggcgcgggaaatgtcggggcgctctcccaagtgacacactttcgagaggattcaggatggggcaaagtagccaaccacatgagttaggcggcgggctgaagagtcgccacgtcaccatgttgtctattgccggtgttatcggcgcaagtctgtttgtcggttccagcgtcgccatcgccgaagcgggcccggcggtattactggcctatctgttcgccgggctactggtggttatgattatgcggatgttggcggaaatggcggttgccacgcccgataccggtagcttttccacctatgccgataaagccattggtcgctgggcgggctataccatcggctggttgtactggtggttttgggtactggttatcccgctggaagccaacatcgccgccatgatcctgcacagttgggttccaggcattcccatctggttattttccctcgtcattaccctcgccttaactggcagtaacttattaagcgttaaaaactacggcgaatttgagttctggctggcgctgtgcaaagtcatcgctatcctggcctttattttccttggtgcagtcgcaattagcggtttttacccgtatgccgaagtgagcgggatcagtagattgtgggatagcggcggctttatgcccaacggtttcggtgcggtattaagcgcgatgttgatcaccatgttcagctttatgggcgcagaaattgtcaccattgccgccgcggaatccgacacgccggaaaaacatattgtccgcgccaccaacagcgttatctggcgtatttctatcttctatttatgttctatttttgtcgtcgtggcattaattccgtggaatatgcccggactaaaagccgtcggttcttatcgcagcgtactggaattgctcaatattccccatgcgaaattaatcatggactgcgtgatattactttccgtaaccagttgcctgaacagcgcgctgtataccgcgagtaggatgctctactccttaagtcgtcgcggtgatgctcccgcggtaatgggtaaaatcaaccgcagtaaaaccccgtacgtggcggtgttactctccaccggcgcggcattcttaacggtggtggtgaactattacgcgcctgcgaaggtatttaaatttctgatcgacagctccggcgctatcgccctgctggtttatttagtcatcgccgttagtcagttgcggatgcgcaaaattctgcgagcagaaggaagcgaaattcgcttgcgaatgtggctttatccgtggctcacctggctagtcatcggctttattacctttgtgttggtagtgatgctattccgtccggcgcaacagttagaagtgatctccaccggcttattagcgatagggattatctgtaccgtgccaattatggctcgctggaaaaagctggtattgtggcaaaaaacacccgttcataatacgcgctgatcatgatcaggagtcacaccatgaccattacgtctctggatggctatcgctggctgaagaacgatattattcgcggtaattttcaaccggatgaaaaattacgaatgagtttgctgacaagccgttatgcacttggcgttgggccgttacgggaagctcttagccaactggtggcggaacggctggtcacggtggtgaatcaaaaagggtatcgggtggcgtctatgagtgagcaggagctgctcgatattttcgacgcccgcgccaatatggaagcgatgttagtgagtctggcgattgcccgcggtggcgatgagtgggaggcagacgttctcgcaaaagcgcatctgctgagtaagcttgaggcctgtgacgccagcgagaaaatgcttgatgagtgggatctgcgtcatcaggcgtttcatacggcaattgtggcgggctgtggttctcactatttgctgcaaatgcgtgaacggttgtttgatctggcggcgcgttatcgatttatctggctgcggcgaacggtgcttagcgtggaaatgctggaggataaacacgatcagcaccagaccctgactgcggcggtactggcgcgagataccgcgcgcgccagtgagttaatgcgccagcatttactgacgccaattcccattatccagcaggcgatggctggcaattaattactcttccggaatacgcaacacttgccccggataaattttatccgggctttttagcatcggtttattcgcttcgaagattttattgtacagattagcgttaccgtagacctgtttggaaatggcactcagagtgtcgccagacttaacggtataaaactggctggcagtggctggtgtcgccgttttcacctgatcatcgacactggcaataccggaaatattccccaccgcaacaaggattttctccttcgcctcctgactcaggccgtcaccagtgaccgtcgctttgccgtcggcaatttgaatattcactttatcggcatccggtataccggttttgttcagatgctcctgcaccttcttcgcctgatcgtctttatcgtgctgacctgtaaccgcgtcccagagtttttctccggcatctttcacaaaattgaacagacccatagctacctcattcgttaacggaaacactcagaaagtgtagcagaggaacgcggcgcgttaacgccgcggggatgagcacaggtttaatcgcgggtttgcacccagaacgcgtgaatcaaaccggggatatacccaagcagtgtcaacagaatattaataatgaacgcccaaccgaaccctttaccgagcagcacgccgagcggcggcagaatgatggtgatgacgattctccagaaacccatatgtactccctataagaaaattactcattgtttaaaaagagattttatctcttaagcgtagtaattttagcggagcctgccagtttcagcttacgcttttactctcatttacgctgctgaggctggtatatgttgcatttttagtttagagtttacttaatttagaaaatacttaaataaatatgactgaactcgcgcaattacaggccagtgccgaacaggcagcggccttattgaaagcaatgagccaccctaaacgattgctgattctgtgcatgcttagcggttcccccggcaccagcgcgggagagctgacgcgcattaccggactgagtgcctctgcgacaagtcagcatctcgctcgtatgcgggacgaagggcttatcgacagccaacgggatgcccaacgcattctatattccattaaaaatgaggcggtaaatgccattatcgccaccctgaaaaatgtctattgtccgtaaggagtcactatggctttgacaaccattagcccgcatgatgcacaagaattaatcgcacgcggcgcaaagttaatcgatattcgtgatgctgatgaatatcttcgtgaacatattcctgaagcagatctggctccattatccgtgctggaacagagtggtcttccggctaaattacgtcacgagcaaattatattccactgccaggcaggtaaacgcaccagtaataatgccgataaattagcagcgattgccgcccccgcagaaatctttttactcgaagatgggattgatggctggaaaaaagcaggattgccagtagcggtaaataaatctcaacccttgccgttaatgcgccaggtgcagatcgctgcgggtggtttaatattaatcggcgttgtactgggttataccgtaaatagcggtttcttcttattaagtggctttgttggtgccgggttactgtttgcaggaatcagcggtttttgtggaatggcaaggttgttagataagatgccgtggaaccaacgagcttgagaagcgacgccggacgcgccctagcagcgacatccggcctcagtaattagatcaggaaatcgtcgagagatttaccttctgccagcgcctgagcaattggcttcggtgtacggccctgaccggtccaggttttagtttcaccgttaacatcggtgaatttatatttcgccggacgcggctggcgttttttaccagcgcgtggtgcagcagcagagctattacccaataactcttccgggttaattccgtcagctttcatcagctccagccaggtgctaattttttcctggcgctctgccagttcacgctgctgctgttcttcttcttcacgtctttctttagtgacaaccctgaatttttcgagcatttcttcaagaacgtcaatggagaattcgcgagccatcgcacggagggtgcgaatgttatttaaactttgtaacattacggacataataaagaaaaccttttaacgccaaaacaaaaaaagtatttcgtcgcgtagtgtaagcgatcacttattatatttccacaaaatttaatctatttacagtcctgcgcgagattatttcagctgttattttctgaaactctcagaataatttcaagattatatattagccattttgatgagtaatttagattattggtgaacagagcggcgctctctgctcgctaattccgcaagcctgacaaaatcaaagtgaataaaaatgcaatataacagaataaaagaaaacatccatcactggtgctttctgctgttaatgtacattgtctggcataaaaaatgctgaaaatgacccagctactacatacaccgaattctctacgcttatagcgttacctcacccccaaactttcattagtgatattaaaggtaaggccatatctaattgatttaattaaaaataaatcatatcggcatgtaaaaatccacaatgtacaaaaaacgagccgttacggaatattttatctacaaaaactgactaaataaaaatttttcactaattgattagtcatagccagcgatatacgctatgcgaaaatgcagatggcaatgagatccactgctttcatctccattaacatcccattacgcttttattaaggagcattagcatgttcagtccgcagagtcgcttgcgtcatgcagttgcagatacgttcgcgatggttgtttactgttctgtcgtgaacatgtgtattgaagttttcctctccggaatgagcttcgaacagtctttttattccagattggtagcgattccggtgaacatcttaattgcatggccatacggtatgtaccgtgatctgtttatgcgcgcggcacgcaaagttagcccgagcggctggataaaaaatctggcggatatcctggcttatgtgacgttccagagtccggtgtatgtggcgatcttgttagtggtgggcgcagactggcatcagattatggcggcggtcagtagtaacatcgttgttagcatgttgatgggggcggtttatggctacttcctcgattattgccgccgactgtttaaagtcagccgttaccagcaggtaaaagcctgactcttcttttcgcgactggcatcgccagtcgcgtctttaactggcttcgccaaataaaccattcaaataacgttcaagcgcaacacggctactaaagccatgcgggataccgtaatgctcgtgtcgctcgcctgctaaatagagcggaaattgctggtaatgatcgcaagttttaatatcggaagcgggttcagccagtgtgctactgcgttcttttaatgttggatgaattaccagagcggtacgtcccattcgcgcttcgcgattaacatagacataattttccccacggcggtaaccatacgctttctgggttaccacatcgacagtaaaaccgactttttcaagtacgcgcgccacctcgtctggtcgtaaatacatatttgatcctcgttattatcaaccgcgggcctaccttacctgattgcgcattcacaacgctttcagaaaagtccataaagccgcgatgaacctcagttaagaaaattatggtctacactgaaaattacatcgaattctaatgggggatcatatgtttaaccgaccgaaccgcaacgacgttgatgatggcgtgcaggatatccagaatgatgtcaatcaattagctgacagcctcgaatctgtattgaagtcctggggcagcgacgccaaaggggaagctgaagccgcacgcagtaaagctcaggcattgctgaaagaaaccagggcgcgaatgcatggtcgtactcgcgtccagcaagccgcgcgcgatgccgttggctgcgcggattcttttgttcgtgaaagaccctggtgtagcgtgggtacagcagctgcggtaggtatttttatcggcgcactgttaagcatgcgcaaaagctaatgcaaaaatgataataaatacgcgtctttgaccccgaagcctgtcttcggggtttctttttgcctggtgaatcacaaaaatccccctaccccgtcacgctcatatccagggtaatttcgaccactatttgctatatattgtgtggttgaatcttttttcaactacatctagtatctctgtatcaacagagagacaacccgacgcgtatcatcgcgccgtatcttcattttaaacggaaatacgaatcatgcgcattactatttacactcgtaacgattgcgttcagtgccacgccaccaaacgggcgatggaaaaccggggctttgattttgaaatgattaatgtcgatcgcgttcctgaagcggcagaagcgttgcgtgctcagggctttcgtcagttgccggtagtgattgctggcgatcttagctggtctggtttccgtccggacatgattaaccgtctgcatccagcgccacacgcggccagtgcatgagccagctcgtctacttctccagcagctccgaaaacacgcagcgttttatcgaacgtttaggtctgcccgcggtgcgcatcccgctcaatgagcgggaacggattcaggtagacgagccttacatcctgatcgtgccctcttacggcggcggcggtacggctggcgcggtgccacgacaggtaattcgctttttaaacgacgagcacaaccgggcgttgcttcgcggcgttattgcttctggtaatcgcaactttggtgaggcgtatggccgcgccggagatgtgattgcccggaaatgcggcgtgccgtggctgtaccgttttgaactcatgggtacgcaaagcgatatcgaaaacgttcgtaaaggagtaaccgaattttggcaacgacaaccgcagaatgcctgacgcaggaaacgatggattaccacgcgctgaatgcgatgcttaacctctacgatagcgcaggtcgcattcagttcgataaagaccgccaggccgttgacgcctttattgcgacgcatgtgcgtccgaacagtgtgaccttcagtagccagcagcagcgcctgaactggctggtcaacgaaggttactatgatgaaagcgttcttaatcgctactctcgcgactttgtcattacgctgtttacccacgcacacaccagcggttttcgtttccagacattcctcggggcatggaagttttacaccagctatacgttgaagacattcgacggtaaacgttatctggaagattttgccgatcgagtaacgatggtggcgctgacgctggcacaaggcgatgagacgctggcgttgcaactgaccgatgaaatgctgagtggacgctttcagccagccacgccaacattcctcaactgcggtaagcagcagcgcggcgaactggtttcctgttttttgctgcgtattgaagacaatatggagagcattggtcgggcggtaaattccgcactgcagctgagcaaacgcggcggcggcgtagcatttttgctgagcaatctgcgagaagcgggcgcgccaattaaacgtattgaaaatcaatcttctggcgtaattccggtgatgaaaatgctggaagacgcattttcctatgccaaccaactcggcgctcgtcagggggctggtgcagtctatttacatgctcatcatcccgatattctgcgttttctcgacacgaaacgggaaaatgccgacgaaaaaatccgcattaaaacactgagccttggcgtggtgatcccggatatcactttccatctggcaaaagagaatgcgcagatggcgctgtttagcccttatgacgtagagcgagtttatggcaagccgtttgccgatgtggccatcagccaacactatgacgaactggttgccgatgaacgcattcgcaaaaaatacctcaacgcccgtgatttcttccagcgactggcagaaatccagtttgagtccggctatccctacatcatgtatgaagacacggtaaaccgtgctaaccctatcgccgggcgcataaatatgagtaatctctgcagtgaaattttgcaggttaacagcgccagtgagtatgacgagaatctcgactatacccgcacaggccatgatatttcctgcaatttaggtagcttgaatattgcgcacaccatggattcccccgattttgcccgcacggtagagactgccgtgcgcggtttaacggcagtaagtgatatgagtcatatccgcagcgtgccgtccatcgaagccggaaatgccgccagccacgccatcggactggggcagatgaatttacacggctatctggcgcgagaaggcatcgcttatggtagcccggaagcactggatttcaccaatctctatttctatgccatcacctggcatgcactgcgtaccagcatgttgctggcacgcgaacgcggtgaaaccttcgccgggttcaaacagagtcgctatgccagtggtgaatattttagccaatatctgcaagggaactggcagccgaaaacggcgaaagttggcgaactgtttacccgtagcggtattacgttacctacccgtgagatgtgggcgcagctgcgcgacgacgtgatgcgctacggcatatacaaccagaatcttcaggcggtgccgccaaccggttctatctcttatatcaaccatgctacgagcagtattcatccgattgtggcgaaagtagagatacgcaaagagggcaaaacaggacgcgtttactaccctgccccgtttatgactaacgagaatctggcgctgtatcaggacgcttacgaaattggcgcagaaaagatcatcgacacctacgcggaagcgactcgccatgtcgatcaggggctgagcctgacgctttttttccccgataccgccaccactcgcgatatcaacaaagcgcagatttacgcctggcgcaagggtatcaaaacgctctattacatccgcctgcgtcagatggcgctggaaggcactgaaattgaaggctgcgtctcctgtgcactttaaggaatatctatgaaactcagtcgtatcagcgccatcaactggaacaagatatctgacgataaagatctggaggtgtggaatcgcctgaccagcaatttctggctaccagaaaaggtgccgctgagcaacgatattcctgcctggcagacattaactgtcgtagaacaacaactgacgatgcgcgtttttactggcctgacgctgctcgacacgctgcaaaatgttatcggcgcgccttctctgatgcccgatgcactcacgcctcatgaagaagcggtattaagcaatatcagctttatggaagcggttcatgcccgctcttacagtagcattttcagcacgctatgccagaccaaagatgtcgatgccgcctacgcctggagtgaagaaaacgcaccgttgcagcgaaaagctcagattattcagcaacattatcgcggtgatgatccgctgaaaaagaaaatcgccagtgtgtttcttgaatcttttttgttctattccggtttctggctgccgatgtatttttccagccgcggaaagctgaccaataccgcggacctgatccgtctgattatccgcgatgaagcagtccacggttactacataggctataaatatcagaaaaacatggaaaagatatctctgggacaacgtgaagagttgaagagtttcgccttcgatttgttgctggaactctacgacaacgagttgcaatacaccgatgagctgtacgccgaaaccccgtgggctgacgatgtgaaagcgtttctctgttacaacgccaataaggctttgatgaatctgggctacgaaccgttatttcccgcagaaatggcggaagtgaatccggcaatcctcgccgcgcttagcccgaatgccgatgaaaatcacgatttcttttccggtagtggctcctcttatgtgatggggaaagcggttgaaacagaagatgaagactggaatttctgagggtgttattttcaaaaatatcactacccgcagcagggaaataattcccgccaaatagctttttatcacgcaaataatttgtggtgatctacactgatactctgttgcattattcgcctgaaaccacaatattcaggcgttttttcgctatctttgacaaaaaatatcaactttctcgatttgctctcagcccttatatcacgggaaattccggcgatttgctcgcatcaatattcatgccacatttgccatcaggggttgcctcagattctcagtatgttagggtagaaaaaagtgactatttccattgggtaatatatcgacatagacaaataaaggaatctttctattgcatggcaattaaattagaaattaaaaatctttataaaatatttggcgagcatccacagcgagcgttcaaatatatcgaacaaggacttagtaaagaacaaattctggaaaaaactgggctaagccttggcgtaaaagacgccagtctggccattgaagaaggcgagatatttgtcatcatgggattatccggcagcggtaaatccacaatggtacgccttctcaatcgcctgattgaacccacccgcgggcaagtgctgattgatggtgtggatattgccaaaatatccgacgccgaactccgtgaggtgcgcagaaaaaagattgcgatggtcttccagtcctttgccttaatgccgcatatgaccgtgctggacaatactgcgttcggtatggaattggccggaattaatgccgaagaacgccgggaaaaagcccttgatgcactgcgtcaggtcgggctggaaaattatgcccacagctacccggatgaactctctggcgggatgcgtcaacgtgtgggattagcccgcgcgttagcgattaatccggatatattattaatggacgaagccttcagcgcgctcgatccattaattcgcaccgagatgcaggatgagctggtaaaattacaggcgaaacatcagcgcaccattgtctttatttcccacgatcttgatgaagccatgcgtattggcgaccgaattgccattatgcaaaatggtgaagtggtacaggtcggcacaccggatgaaattctcaataatccggcgaatgattatgtccgtaccttcttccgtggcgttgatattagtcaggtattcagtgcgaaagatattgcccgccggacaccgaatggcttaattcgtaaaacccctggcttcggcccacgtagcgcactgaaattattgcaggatgaagatcgcgaatatggctacgttatcgaacgcggtaataagtttgtcggcgcagtctccatcgatagccttaaaaccgcgttaacgcagcagcaaggtcttgatgcggcgctgattgatgcgccgttagcagtcgatgcacaaacgcctcttagcgagttgctctctcatgtcggacaggcaccctgtgcggtgcccgtggtcgacgaggaccaacagtatgtcggcatcattagcaaaggaatgctgctgcgcgctttagatcgtgagggggtaaataatggctgatcaaaataatccgtgggataccacgccagcggcggacagtgccgcgcaatccgcagacgcctggggtacaccgacgactgcaccgactgacggcggtggtgctgactggctgaccagtacgcctgcgccaaacgtcgagcattttaatattctcgatccgttccataaaacgctgatcccgctcgacagttgggtcactgaagggatcgactgggtcgttacccatttccgtcccgtcttccagggcgtgcgcgttccggttgattatatcctcaacggtttccagcaattgctgctgggtatgcccgcaccggtggcgattatcgttttcgctctcatcgcctggcagatttccggggtcggaatgggtgtggcgacgctggttagcctgattgccatcggcgcaatcggtgcctggagccaggcaatggtgactctggcgctggtgttaaccgccctgctgttctgtatcgtcatcggtttgccgttggggatatggctggcgagaagtccgcgagcggcgaaaattattcgtccactgcttgatgccatgcagaccacgccagcgtttgtttatctggtgccaatcgtcatgctatttggtatcggtaacgtgccgggcgtggtggtgacgatcatctttgctctgccgccgattatccgtctgaccattctggggattaaccaggttccggcggatctgattgaagccagccgcagtttcggtgccagcccgcgccagatgctgttcaaagttcagttaccgctggcgatgccgaccattatggcgggcgttaaccagacgctgatgctggccctttctatggtggtcatcgccagcatgattgccgtcggcgggttgggtcagatggtacttcgcggtatcggtcgtctggatatggggcttgccaccgttggcggcgtcgggattgtgatcctcgccattatcctcgatcgtctgacgcaggccgttgggcgcgacagtcgcagtcgcggcaaccgtcgctggtacaccactggccctgttggtctgctgacccgcccattcattaagtaactctgcacttgcccggtgacgccgggcattatcaccctgccaaaaaaaggaataacaatgcgacatagcgtactttttgcgacagcgtttgccacgcttatctctacacaaacttttgctgccgatctgccgggcaaaggcattactgttaatccagttcagagcaccatcactgaagaaaccttccagacgctgctggtcagtcgtgcgctggagaaattaggttataccgtcaacaaacccagcgaagtagattacaacgttggctacaccagccttgcttccggcgatgcaaccttcaccgccgtgaactggacgccactgcatgacaacatgtacgaagctgccggtggcgataagaaattttatcgtgaaggggtatttgttaacggcgcggcacagggttacctgatcgataagaaaaccgccgaccagtacaaaatcaccaacatcgcacaactgaaagatccgaagatcgccaaactgttcgataccaacggcgacggaaaagcggatttaaccggttgtaaccctggctggggctgcgaaggtgcgatcaaccaccagcttgccgcgtatgaactgaccaacaccgtgacgcataatcaggggaactacgcagcgatgatggccgacaccatcagtcgctacaaagagggcaaaccggtgttttattacacctggacgccgtactgggtgagtaacgaactgaagccgggcaaagatgtcgtctggttgcaggtgccgttctccgcactgccgggcgataaaaacgccgataccaaactgccgaatggtgcgaattatggcttcccggtcagcaccatgcatatcgttgccaacaaagcctgggccgagaaaaacccggcagcagcgaaactgtttgccattatgcagttgccagtggcagatattaacgcccagaacgccattatgcatgacggcaaagccagtgaaggcgatattcagggacacgttgatggttggatcaaagcccaccagcagcagttcgatggctgggtgaatgaggcgctggcagcgcagaagtaatttttattcgggcggataaggcgtttttgccgcatccgccgttctgtgcacaatgcctgatgcgacgctggcgcgtcttatcatgcctacaaaccacatcgcacatttcaacaatctatctttcatcccatattcatcaacatccgctattattgatttccagcttaatcatcacctgatgaacaaaaataatgactaaacctaatcatgagcttagcccggcgctgatcgtgctgatgtctatcgccaccggtctggcggtagccagtaactattacgcccagccattgctcgacaccatcgcgcgtaacttttccctttccgccagtagcgcaggctttattgttaccgccgcgcagttgggctatgccgcaggtctactgtttcttgttcccctcggtgatatgtttgaacgccgccgcctgattgtcagcatgaccttactggcggcatgttgattaccgccagcagtcagtcgctggcgatgatgatcctcggtacggcattaaccggtttattcagtgtcgtggcacaaattctggttccgctggcagcgacgctggctagtccggataaacgcggcaaagtggttggcactattatgagcggtctgctgttggggatcttgctggcacggacagttgccggattgctggcgaatctcggcggctggcgcaccgtcttttgggttgctagcgtgttaatggcactgatggcgctggcattatggcgtggtctgccacaaatgaaaagtgaaacccacctcaactacccacagttgttgggttccgttttcagtatgtttatcagcgataaaattctgcgtacccgcgcgttgctgggctgcctgacctttgccaatttcagcattctctggaccagtatggcctttttgcttgccgctccaccttttaactacagcgatggtgtcattggtctgtttggacttgcgggagctgccggagcgttgggcgctcgtccggcgggcggttttgccgataagggcaaaagccaccacaccacaactttcggtctgctgctgctattacttagttggctggcgatctggtttggtcacacttccgtactggcgttgattatcggaatcctggtgctggatctcaccgtgcagggcgtgcatatcactaaccagacggtaatttatcggatacatcctgatgcgcgcaatcgcctgaccgcaggttacatgactagctactttattggcggtgccgccggtagcctaattagtgccagtgcctggcaacatggcggttgggctggcgtttgtctggctggcgcgacgattgccctggttaacttactggtctggtggcgaggttttcatcgtcaggaagccgcaaattaagcaatcagcaaccgttttcgtggctttacacttataagggtgttaagaagcccatcagtctgataaggttaagatattcattcagtctatttataatattaacaatcgttaagcgtacactctatggaaagccctactccacagcctgctcctggtagcgcgaccttcatggaaggatgcaaagacagtttaccgattgttattagttatattccggtggcctttgcgttcggtctgaatgcgacccgtctgggattctctcctctcgaaagcgtttttttctcctgcatcatttatgcaggcgcgagccagttcgtcattaccgcgatgctggcagccgggagtagtttgtggattgctgcactgaccgtcatggcaatggatgttcgccatgtgttgtatggcccgagtctgcgtagccgtattattcagcgtctgcaaaaaagcaaaaccgccctgtgggcgtttggcctgacggatgaggtttttgccgccgcaaccgcaaaactggtacgcaataatcgccgctggagcgagaactggatgatcggcattgccttcagtagttggagtagctgggtatttggtacggtaataggggcattctccggcagcggcttgctgcaaggttatcccgccgttgaagctgcattaggttttatgcttccggcactctttatgagtttcctgctcgcctctttccagcgcaaacaatctctttgcgttaccgcagcgttagttggtgcccttgcaggcgtaacgctattttctattcccgtcgccattctggcaggcattgtctgtggctgcctcactgcgttaatccaggcattctggcaaggagcgcccgatgagctatgaggttctgctgcttgggttactagttggcgtggcgaattattgcttccgctatttgccgctgcgcctgcgtgtgggtaatgcccgcccaaccaaacgtggcgcggtaggtattttgctcgacaccattggcatcgccagcatatgcgctctgctggttgtctctaccgcaccagaagtgatgcacgatacacgccgtttcgtgcccacgctggtcggcttcgcggtactgggtgccagtttctataaaacacgcagcattatcatcccaacactgcttagtgcgctggcctatgggctcgcctggaaagtgatggcgattatataacccacaagaatcatttttctaaaacaatacatttactttatttgtcactgtcgttactatatcggctgaaattaatgaggtcatacccaaatggatagtagctttacgcccattgaacaaatgctaaaatttcgcgccagccgccacgaagattttccttatcaggagatccttctgactcgtctttgcatgcacatgcaaagcaagctgctggagaaccgcaataaaatgctgaaggctcaggggattaacgagacgttgtttatggcgttgattacgctggagtctcaggaaaaccacagtattcagccttctgaattaagttgtgctcttggaagttcccgtaccaacgcgacgcgtattgccgatgaactggaaaaacgcggttggatcgaacgtcgtgaaagcgataacgatcgccgctgcctgcatctgcaattaacggaaaaaggtcacgagtttttgcgcgaggttttaccaccgcagcataactgcctgcatcaactctggtccgcgctcagcacaacagaaaaagatcagctcgagcaaatcacccgcaaattgctctcccgtctcgaccagatggaacaagacggtgtggttctcgaagcgatgagctaacgcgtcatctcgctcaaaaatccagatttataaaagaaaaaatgactggccagcatcgcaacatgctggcctttttggcaagcaggtcggctcagccgatgagttaagaagatcgtggagaacaatatgagcgcaaatgcggagactcaaaccccgcagcaaccggtaaagaagagcggcaaacgtaagcgtctgctcctccttctcaccttgctctttataattattgccgtagcgatagggatttattggtttttggtactgcgtcacttcgaagaaaccgatgacgcatacgtggcagggaatcaaattcaaattatgtctcaggtgtctggcagcgtgacgaaagtctgggccgataacaccgattttgtaaaagaaggcgacgtgctggtcactctcgacccgacagatgctcgccaggcgtttgaaaaagccaaaactgcactggcttccagcgttcgccaaacccaccagctgatgattaacagcaagcagttgcaggcgaatattgaggtgcagaaaatcgccctcgcgaaagcacaaagcgactacaaccgccgtgtgccgctgggcaatgccaacctgattggtcgcgaagagctgcaacacgcccgcgacgccgtcaccagtgcccaggcgcaactggacgtcgcgattcaacaatacaatgccaatcaggcgatgattctggggactaaactggaagatcagccagccgtgcaacaggctgccaccgaagtacgtaacgcctggctggcgctggagcgtactcgtattatcagtccgatgaccggttatgtctcccgccgcgcggtacagcctggggcgcaaattagcccaacgacgccgctgatggcggtcgttccagccaccaatatgtgggtggatgccaactttaaagagacgcagattgccaatatgcgtatcggtcagccggtcactatcaccacggatatttacggcgatgatgtgaaatacaccggtaaagtggttggtctggatatgggcacaggtagcgcgttcagtctgcttccagcgcaaaatgcgaccggtaactggatcaaagtcgttcagcgtctgcctgtgcgtatcgaactggaccagaaacagctggagcaatatccgctgcgtatcggtttgtccacgctggtgagcgtcaataccactaaccgtgacggtcaggtactggcaaataaagtacgttccactccggtagcggtaagcaccgcgcgtgaaatcagcctggcacctgtcaataaactgatcgacgatatcgtaaaagctaacgctggctaatccagaggtgcgtgtgatgcaacagcaaaaaccgctggaaggcgcgcaactggtcattatgacgattgcgctgagtctggcgacattcatgcaggtgctggactccaccattgctaacgtggcgatccccactatcgccgggaatctgggcagtagcctcagccagggaacgtgggtaatcacttctttcggggtggcgaatgccatcagcatcccgcttaccggctggctggcaaagcgcgtcggggaagtgaaactgttcctttggtccaccatcgcctttgctattgcgagctgggcgtgtggtgtctccagcagcctgaatatgctgatcttcttccgcgtgattcaggggattgtcgccgggccgttgatcccgcttagccaaagtctattgctgaataactacccgccagccaaacgcagcatcgcgctggcgttgtggagcatgacggtgattgtcgcgccaatttgcggcccgatcctcggcggttatatcagcgataattaccactggggctggatattcttcatcaacgtgccgattggcgtggcggtggtgttgatgacactgcaaactctgcgcggacgtgaaacccgcaccgaacggcggcggattgatgccgtggggctggcactgctggttattggtatcggcagcctgcagattatgctcgaccgcggtaaagagctggactggtttagtagtcaggaaattatcatccttaccgtggtggcggtggtggctatctgcttcctgattgtctgggagctgaccgacgataacccgatagtcgatctgagcttgtttaagagccgcaacttcaccatcggctgcttgtgtatcagcctcgcgtatatgctctacttcggcgctattgttctgctgccgcagttgttgcaggaggtctacggttacacggcgacctgggcaggtttggcctctgcgccggtagggattattccggtgatcctgagcccgattatcggccgcttcgcgcataaactggatatgcggcggctggtaaccttcagctttattatgtatgccgtctgcttctactggcgtgcctatacctttgaaccaggtatggattttggcgcgagcgcctggccgcagtttatccaggggtttgcggtggcctgcttctttatgccgctgaccaccattacgctgtctggtttgccaccggaacgactggcggcggcaagcagcctctctaactttacgcgaacgctggcggggtctatcggcacgagcataaccacgaccatgtggaccaaccgcgagagcatgcaccatgcgcagttgactgagagcgtaaacccgttcaacccgaatgcccaggcgatgtacagtcaactggaagggcttgggatgacgcaacagcaggcaagtggctggattgcccagcagatcaccaatcaggggctgattatttccgccaatgagatcttctggatgagtgccgggatattcctcgtcctgctggggctggtgtggtttgctaaaccgccatttggcgcaggtggcggcggaggcggtgcgcactaagtacaactaagccagttcatttgaactggcttttttcaattaattgtgaagatagtttactgattagatgtgcagttcctgcaacttctctttcggcagtgccagttcttcgttgctgttgatgcgtacgtcacgttccagaatgctacgcgcaatatcctgcgcttcctgcaagctgtgcatctggtaagtgccacactggtagacgttcagttccgggatctgattctgatcctgcactttcagcacgtcttccattgccgttttccaggcatcagcaacacgctgctcatctggcgtaccaatcagactcatataaaaaccggtgcggcagcccattgggctgatatcgataatctctacaccattaccgttaagatggttacgcataaaaccagcaaacaggtgctccagggtatggatccctctttctggcatcacttctttgttcggcacgcagaagcgcagatcgaacacggtgattgcgtcgccatgcggggtgttcattgttttcgccacccgaactgcaggcgcttccatccgggtatgatcgactgtgaagctatctaacaacggcatttagccacctccggtaatttttttaaaaattttctgaactctttcttcccaggcgagtctgagtatatgaaagacgcgcatttgttatcatcatccctgaattcagagatgaaattttggccactcacgagtggcctttttcttttctgtcaggcgtgtttttccagccacaccgcaaacggttcggtatcagcggcttccatttcctgctgacggcgttcagacgcctcgcgctcggctacaaaatcctcttcgcgcagaatttccagcggctcttcacgcagcagattacggtaggcttctgcaaatgctttgcctgttccgccaataccagtatcaatcatagaccttaagatacgggcagagaaagtcagatcgggattatcgaagcaggcaaccagttcatcacacactttctgatacgcttcgccgccgttaatactatccagcgtttgcgcgacgcgtttcagatcgcggaacagatctttacccacctgcggtaacgggaactgtgcggtttcgcagccgatacccagcgtcagacccggtttgcgaccttcgaggatcacccggttccagttaacgcgtgtacaggcaagttcgctactgctcatttccggtgcatcagccagcgcacaccagaccataaacaggtcgaggaatcgcacctgctgttcatctacaccaatcgggctgaacgggttgatgtccaggctacgcacttcaatatattcaatgccgccacgtaacagcgcatcagaagggctctcgccgctgcgggtaacgcgttttggacgaatcggcgcgtacagttcgttttcaatctgcaacacgttgctgttgatttgcagcctcttaccgtctttctcaataccaatcttcgcgtactcttcgcttggcgttttgattgcctgtttaaggcccgctacgtactcgtaaagatcgttgaaggtaataccaagattgctttggcttttattggtatagccgagatcgctcaaacgaagagaggtcgcatacggcaggtaatacataccgcactcggttttctcaaacggcaggctcgttggttttccttgcaggaaagaagaacaaatcgccggagatgcaccaaacagataaggaatgacccaaccgaaacgatagtaattgcggataacgcggaaatagcccgcagaaattttctctttggcatcagcgccgctgatatcaccgcacttcgcttgccagaatgccattggcaaagagaaattgtagtgcacgccggaaatggtttgcatcagcgcgccgtagcgatttttcagcccttcacgatacagcgttttaaagcgtccggtgttagaagtgccgtactgtgccagttcgatgtcctgaccttctgcgatgtagcatggcatacttaacggccacatccgctcatcgcccatattgcgcgccgtataacgatgcagatcgcgcataaaggtcagcatatgttcaatatcaccatccactggtgtaatgaattccagcaatgcttccgcaaaatcggtagtaatccatttgtgcgtcagtgcggaacctaatgcttcaggatgacctgttgttgccagtgtgccatcagcattaacacgcaaagtttcgcgctccagcccacgctgtatcccctttaacgcctgaggatgtttttccagccaggccagcgcctgacttacgtccgggatcaaattgacctcccgcctgtcaaaatcgttttaattagcataactgtaatggtgaccatatgtgcaggcctacaattagtgccaccacatcatgccctgaacggtcgctgctgcaactgcaacatagcgtaacgctttaccaaggcacaaaaaaaagattaccggtccccagctgatgcgcatccatcccgctaacagacacagtaaatcgccaaccacgggcatccagcttaataatagcgtgactgcaccatagcgtttcagccagccggtagctttctcttgccagcggcttgttttacgcaatggaaagaaacgcccaaggataacgttagttaaccctccaaggctattacccattgttgctgttaaaactaaaacccagggatgactgatcccggaaagcaacattgccaccagcacgacttcggagttgccgggtaatagtgtagcgctgagaaaactactggcaaacaagctgaaaaggcttaacgcttcactcacagcaagcgaacatccacggcgtccatgcctgctgcacgggccgcctgaataccgaaatcggcatcttcaaagaccacacactgcgtcggttgcacgcccatacgctgcgcgcacaacaaaaatgtgtctggcgcgggtttatggtgtttgacgtgatcggcagcgacgacggcgtcaaaataatggcgtaatcccaggtgcgccagcaatgcctcagcgatggcgctttcactccccgttcctacagccattgggcgacgaccatgccaacttttcaccacatcaacaagaggaagcggttcgacgctatccagcagcatacttcttactgcttctgttttttcacgcgctaacgcatgcgggtcgagatcggcctgattcagctcaataattgcctgagcaatacgccaggtggggcttccattaagcgcaatcatcgcctgaatatcgtactgaagaccgtagtgccctaatacttcgcgccacgctttacggtgcgtaggctccgtatccaggattgtgccatccatatcaaaaattaaacctgcataacgctcgtacatggtcttctcgcaagtcgaaaaatatgacgctactttagcgtaattgcttgattttgtcgctgatggcgaaggagaagaaaattcaggaaatggataaaggagttatttagaaatgagatatttttgaaggaaattttttggagaagatggtgcatccgggaggatgactcactgacgttcgcccttcgggccgttgctggcgcaacgttatccttcctggtgcctgcggttaataccgctatctcttcgataccttcattgctgaaggttacggagaatatggtgcatccgggaggattcgaacctccgaccgctcggttcgtagccgagtactctatccagctgagctacggatgcatcgggaaaacttattctactgctgatattgataccgctactaaagccatatcaattaagagatggtgcatccgggaggattactcgccttgcggctcgcccttcgggccgttgctaaagcaacgttatcatccctagtgcctgcggttaattccgctacctcttcgataccttcattgctgaagatttcggagaatatggtgcatccgggaggattcgaacctccgaccgctcggttcgtagccgagtactctatccagctgagctacggatgcatcgggaaatttattttactgctgatattgataccgctactaaagccatatcaagtaagagatggtgcatccgggaggattcgaacctccgaccgctcggttcgtagccgagtactctatccagctgagctacggatgcatcgggaaacttactttactgcagattttttgataccgctactaaagccgtatcaagtaagagatggtgcatccgggaggattactcgccttgcggctcgcccttcgggccgttgctaaagcaacgttatcctccctggtgcctgcggttattaccgccacctcttccataccttcatcgctgaaagtacgtagaatatggtgcatccgggaggattcgaacctccgaccgctcggttcgtagccgagtactctatccagctgagctacggatgcaaatggcggtgaggcggggattcgaaccccggatgcagcttttgaccgcatactcccttagcaggggagcgccttcagcctctcggccacctcaccacacgcctcttacgagtgcttcgaagaacttgtttatcgctcatcgtcgctgcgtggcgcacatattactttctgagacttataagtcaaacaatttttcctacacttttatcgtttgcacacttcacgttcaattagtctgtaaaaacgtcaaaaagagtgttttatcaacagaagaatggaggtctgacagatagtagtaatgcaaaaaaatggagacttaagttgaatgaacgggagtaaagcgaaaagactatagagtgaaggagaaattttgagggtgcgtctcaccgataaagatgagacgcggaaagattagtaactggactgctgggatttttcagcctggatacgctggtagatctcttcacggtgaacagaaacttccttcggggcatttacgccaatacgtacctggttgccctttacccctaaaactgtcacggtgacctcatccccaatcatgagggtctcaccaactcgacgagtcagaatcagcattctttgctccttgaaagattaaaagagtcgggtctctctgtatcccggcattatccatcatataacgccaaaaagtaagcaatgacaaacacattacatctaagcagtcatggcattacattctgttaaacctaagtttagccgatatacacaacttcaacctgactttatcgttgtcgatagcgttaatgcgaatgccgtgaagcgagtccacggcattgcctgacgcttatattattgcaatttcgcgctgacccagcctttcacactggctaacgctgcaggtaaggccgcagcatccgtaccaccggcttgcgccatgtcaggacgtccaccacccttgccgcccacctgctgagcgaccataccaatcagttcccctgctttcacacgatctgtgacgtccttagatacgcctgcaatcagagaaaccttaccttcgactaccgttgccagcacgataattgtgctccccagctgattttttaaatcgtcaaccatggtacgcaacattttcggctcaacaccgctaagctcgctaaccaacagcttaacaccattaacatcaattgccttactggaaagatttgcgctctcctgtgcggcagcttgttctttaagctgttgtaactctttttccagctgacgcgtacgttccagtacactgcgcactttatcagccagattattgctatcgcctttcagcagatgcgcgacttcgcttaagcgatcgctgtctgcatgaacggtggcgatagcaccttctccggttaccgcttcgatacgacgaacgcctgcagcagtaccgctttcagagatgatgcggaacagaccaatatcaccagtgcggctggcgtgagtaccgccacacaactcggtagagaaatcgcccatgctcagcacgcgtacgcgctcatcatacttctcgccgaacagcgccatcgcacctttcgctttcgccgcttcgagatccatgatgttggtttcgatcggcaaattgcgacgaatctgtgtgttcaccaggtcttcgaccgcacgaatctcttctggtttcatcgcttcgttgtgactgaagtcgaagcgcagcaccttgtcgttaaccagactacctttctggcttacatgagtacccagaacctggcgcagcgcagcgtgcatcaggtgcgttgcggagtgattcagacgaatacgggcgcgacgagcctcatcaacatcagcctgcaccgcgtcgcccactttcagagaacccgcagcaagtttaccgatgtgaccaatcgcctggccgtatttctgcgtatcttccaccgcaaaggagaagttagcgcctttcagttcgcctttatcgccaacctgaccgccggattccgcatagaatggcgtttgatccagcacgaccacagcttcctggcctgcattgatggcatcaaccgctttaccatcaacaaacagcgcagtcactttgccgttcagttccagatggtcatagcctttaaattcagatgcactgtcaacacggatcattgcgttgtaatcggcaccaaagccgctggcttcgcgcgcgcgacgacgctgctcttccattgcagcttcaaaaccagcttcgtcaactttgatgttgcgctcacgacaaacatcagccgtcaggtcaaccgggaagccataggtgtcgtacagacggaaagcagtttcaccatccagcgtatcaccagaaagttttgccagctcttcatccagcaacgccagaccgcgctccagagtacgagcaaactgctcttcttcagtcttcagcacctgctcaacctgcgcctgctggcgtttcaggtcttcacccgcagagcccataacgtcgatcagcggaccaaccagtttgtagaagaaggtttctttcgcgccgagcatattaccgtgacgcactgcgcgacgaatgatacgacgcagtacataaccacggttttcattggacggcattacgccatccgcgatcaggaacgcacaagaacgaatgtggtcagcgattacgcgcaggcttttattgctcagatcggttgcgccagtgactttcgctaccgcctggatcagcgtgcggaacaggtcgatgtcatagttagagttaacgtgttgcagcaccgcagcaatacgctccagacccataccggtatctacagacggcttcggcagcggttccatcgtgccatcggcctggcggttgaactgcatgaagacgatgttccagatctcaatgtagcggtcgccgtcttcttccgggcttcccggagggcccccccaaatgtggtcgccgtgatcgtagaagatttcggtgcacgggccgcacggaccagtgtcacccatctgccagaagttgtcagatgcgtatggcgcacctttgttatcgccgatgcgaataatacgttcgcgcgggatccctacttctttttcccagatttcgtaggcttcgtcgtcgctttcatagacggtaacccacagacgctctttcggcagggcaaaccatttttcgctggtcagcagttcccatgcaaactgaatggcatcgtgtttgaaatagtcgccgaagctgaagttgcccagcatttcgaagaaggtatggtgacgcgcggtgtaaccgacgttttccaggtcgttgtgtttaccacccgcacgcacgcagcgttgggaagtggtagcgcgggaataattacgcttgtcgagcccaaggaacacatccttgaactggttcatcccggcgttggtaaacaacaaagttgggtcgttatggggtaccagggagctgctggcaactacctgatgtcccttactatggaaaaagtcgagaaacgcctgacggatctcagcggtgctcttgctcataattatcctgaaatcaagctaacgaaatatcgccaccagctccagcgtgtcttaaccgccgggctggtaactgaaaagtgggaataagataagttttcttgactgggaagtaaaataccgtatgcgttcagtcggcaaaatttcgccaaatctcctggatatcttccatcagatagccacgatagagcagaaaacgctggatcttaactttttcactaaagacagttggcaaaggttcgccatattttcgcgtcgcctgatcgcgcgccagtgcgcaccagtcgatgtcacattcacgcatcgctttttctgtcgcttcgcgggaaatacctttctgattcagttcctggcgaatacgcgcaggtccataacctttgcggctacggctggcgataaagcgcgcaacaaatcggctgtcatcgagatagccatgttcatggcaccaggcaataacgcgctcgtaatcttctgccgtagcatcaatctcttctgggccatttttgcccataatcggtgccgcgagtttacgtcgcagttcttgctcactgtgatcgcgcaccgccagaatgcgtaccgcacgatccaacaggcgagcatatgccgggcgacgggatgtactttctgtcatggcatatccttacaacttaaaaaagcaaaagggccgcagatgcgacccttgtgtatcaaacaagacgattaaaaatcttcgttagtttctgctacgccttcgctatcatctacagagaaatccggcgtactgttcgggttgctcagcagcaactcacgtactttcttctcgatctctttcgcggtttccgggttatctttcagccaggcagtcgcattcgctttaccctgaccgatcttctcacctttgtagctgtaccacgcgcctgctttctcgatcagcttctcttttacgcccaggtcaaccagttcgccgtagaagttgataccttcgccgtagaggatctggaattcagcctgtttaaacggcgcagcgattttgttcttcaccactttcacgcgggtttcgctacccaccacgttttcgccctctttcaccgcgccgatacgacggatgtcgagacgaacagaggcgtagaatttcagcgcgttaccaccggtagtggtttccgggttaccgaacatcacaccaattttcatacggatctggttgatgaagatcagcagcgtgttggactgcttcaggttacccgccagcttacgcatcgcctggctcatcatacgtgccgcaaggcccatgtgagagtcgccgatttcgccttcgatttccgctttcggcgtcagtgccgccacggagtcaacgacgataacgtctactgcgccagaacgcgccagggcgtcacagatttccagtgcctgctcgccggtgtccggctgggagcacagcaggttgtcgatatcgacgcccagtttacgtgcgtagattgggtccagcgcgtgttcagcatcgataaacgcacaggttttaccttcacgctgcgctgcggcgatcacctgcagcgtcagcgtggttttaccggaagattccggtccgtagatttcgacgatacggcccatcggcagaccacctgccccaagcgcgatatccagactaaggctaccggtagagatggtttccacatccatggaacggtcttcacccaggcgcatgatggagcctttaccaaattgtttctcaatctggcccagtgctgccgccaacgctttctgtttgttttcgtcgatagccatttttactcctgtcatgccgggtaataccggatagtcaatatgttctgttgaagcaattatactgtatgctcatacagtatcaagtgttttgtagaaattgttgccacaaggtctgcaatgcatacgcagtagcctgacgacgcaccgcatcacggtcgccgctgaagcattcccgccgggtaatgccttcaccgcgggcagtggcaaaagcaaaccagacggtgccgacaggcttctcttcactgccgccatccggcccggcgataccactaatagacacggcataatcagcacgagccgctttcagtgcgcctatcgccatttccaccacgacgggttcactcaccgcgccatgctgcgccagcgtctcttcgcgtacgccgatcatctgcgctttggcttcgttactgtaggtgacaaatccgcgttcaaaccaggcggagctaccggcaatatcggtaatcactttcgctacccaaccaccggtacaagactcggcagttgttacggttgcgccacgggctttcagcgcctgcccaacctgttcacttaactgcatcagttcactgtcagtcatcacaacctctgtcagtcaaaaatttatgccggacaagatagcactttcgtcaggaagatggtgttggcgttgcaattttacgaggaggattcagaaaaaagctgattagccagagggaagctcacgcccccctcttgtaaatagttactgtactcgcgccagcgccacggcttgtcctaactgccagaccgccattgcgtaatgggtgctgtggttgtaacgggtgatggtgtagaagttcggcagaccgtaccagtactggtagccggtgccaacatccagacgcagcaggctggcttgttgatggttgcccagcggctgctgtggcgttaaacctgcggcggcaagctggctaatgctgtacttagttttgaagccatttggcaagcctggagcctgaccgtttgccattaccgcgacctgatcgcctttcacccagccgtgcgctttgaaatagttcgccacgctaccgatcgcatcaaccggatcccacaggttgatatgcccgtcgccgctgaaatctaccgcatattgtttgtaagagctcggcataaactgtccgtagcccatcgccccggcaaaggaacctttcagattgagcggatcgtcctgctcgtcgcgcgccatcaacaggaaggtttccagctcgccagagaaatactccgcgcggcgtgggtagttaaaactcagcgttgccagcgcatcgaggatgcgagttttccccatcacgcgcccccagcgggtttcaacgccgataatcccgacgataatttccggcggtactccatacacctgccacgcgcgattcaacgcatcttcatactgattccagaaaaccacaccgttctgcacgttgtccggcgtaataaattttttgcgataacggagccatgcgccgttcggaccacttggcggtttcacgcttgtggttggtgcctggttatccatcagccgcagtacgctatccagacgcttcgcctgggagagaatttcctgcaactgctgacgatcgaaaccgtgtttgttcaccattttgtcgatgaactgctgggcattcgggttattagcgaaatcgccgcccatctgcatcacattgtgctgcggctcaagcaggaagccgccagacggcgttccggtggtcgtatcagtctcagtaggttttggcttgctgctacaggcggcaagcaacacaaaaaggggaagcaatgttacataacgacgcttgaacatgaggggtccatttaacagattcaaccaggggcaagtatggtaaagcatcacgccccgcacaaggaagcggtagtcactgcccgatacggactttacataactcaactcattcccctcgctatccttttattcaaactttcaaattaaaatatttatctttcattttgcgatcaaaataacacttttaaatctttcaatctgattagattaggttgccgtttggtaataaaacaataaatcctgaaggagagaacaatgatagaaaccattactcatggtgcagagtggtttatcgggctgttccaaaagggcggagaggtgtttaccgggatggtgaccggcattcttccgctgttgattagcctgctggttatcatgaacgcactgattaattttatcggtcagcatcgtattgaacgttttgctcaacgttgcgccggtaaccctgtttcccgttacctactgttaccgtgcattggcacgtttgtcttttgcaatccgatgaccctaagcctgggtcgctttatgccggaaaagtacaaacccagctactacgcggcggcctcttatagctgccacagtatgaatggcctcttcccccatatcaaccctggcgaactgtttgtttatcttggcattgccagcggtctgacaacgctgaacctgccacttggcccactggcggtgagttatctgctggttggtctggtcaccaatttcttccgcggctgggtgaccgatctgaccaccgccatttttgagaaaaagatgggcattcaacttgaacaaaaagttcacctggcaggagcaacaagttgaaataacacctggcaggagcaacatcatgacgcatattcggatcgaaaaaggaacgggtggctggggcggcccgcttgagctgaaagccacgccgggaaaaaaaatcgtctatatcaccgccggtacccggcctgcgattgttgacaaactggcacagcttactggctggcaggctattgacggatttaaagaaggtgaacccgcggaggtggaaattggtgtcgcggtaatcgactgtggcggcacattacgctgcggcatctatccgaaacgacgtattcccaccattaatatccacagcacgggcaagtccggtccgctggcgcagtacattgtggaagatatttatgtctctggcgtaaaagaagaaaacatcactgtagtaggtgatgcgacaccacaaccctcttccgtgggccgtgactatgacaccagtaagaaaatcaccgaacaaagcgatggtttactggcgaaggtgggaatgggcatggggtccaccgttgcggtgctgtttcaatctggtcgtgacaccatcgacactgtattaaaaaccattctgccgtttatggcattcgtcagcgcgctcattggcatcattatggcttctggccttggtgactggattgcccacggtcttgctccgctggcgagccatccactgggtctggtcatgctggcgctcatctgttccttcccactgcttagtcctttcctcggcccaggcgcagttatcgcacaggttatcggcgtattgattggcgtgcagattggtctcggcaatattccgccgcatctggctttaccggcactgtttgccatcaacgcgcaggcggcctgcgacttcatcccggtcggtttgagcctggcggaagcccgtcaggacacggttcgcgtcggtgtcccttctgtactggtgagccgctttttaaccggcgcgccgactgtactgatcgcctggtttgtctccggttttatctatcaataaaggctgaaacatgaccgttatttatcagaccaccatcacccgtatcggcgcgagtgccattgacgccctcagtgaccagatgctcatcacctttcgtgaaggcgcgcctgcggacctcgaagagtattgcttcattcattgccacggcgagttgaaaggtgcactccatcccggtttgcaatttagtctcgggcagcatcgctatccggtgaccgctgttggcagcgtggcggaagacaaccttcgcgaactgggtcatgtcaccctgcgcttcgatggtttaaacgaagcggaatttccgggcactgtccatgtggcaggccctgtccccgacgatatcgcgccgggaagcgttttgaagtttgaatctgttaaggagtaaaaaatgaatcaggttgccgttgtcatcggtggtgggcaaaccttaggcgcgttcctgtgccacggtctggctgccgaggggtatcgcgtcgcggttgtcgatattcagagcgacaaagccgcaaatgtggcacaagaaattaacgccgaatatggtgaaagtatggcgtacggttttggtgctgacgccactagcgagcaaagcgttctggcgctctctcgtggggtagatgaaatctttggtcgcgtggatttgctggtctacagcgccggaatagcaaaagcagcctttatcagcgacttccagctcggcgattttgaccgtagcctacaggtgaatctggtgggttatttcctgtgtgcgcgtgaatttagccgtttgatgatccgcgacgggattcaggggcgcattattcagatcaacagcaaatccggcaaagtgggcagcaaacacaactctggctacagcgcagcgaaatttggtggcgtcgggctgactcaaagtctggcgctggatctggcggagtacggcattacggtgcatagtctgatgctcggtaacctgctgaaaagcccgatgttccagagtctgttgccacaatacgcgaccaagctgggtatcaaaccggatcaagtcgagcagtattacatcgacaaagtaccgctcaaacgcggctgcgattatcaagatgtgctgaatatgctgctgttctacgccagtcctaaggcgagctactgcaccggacagagcatcaatgtcaccggcggtcaggtgatgttctgatcaacagcggagatccattaaggatctccgtgagactatagaatgcctgatgcgctacgctcatcaggcatacaggacttccgccactacattaaggaaaagttatggtatccgcactcatcaccgtcgccgttatcgcctggtgtgcgcaactggccttaggcggctggcaaatttctcgttttaaccgtgccttcgacacactatgccagcaagggcgggttggcgtgggccgttccagcgggcgctttaaaccgcgggtcgtggtcgccatcgcgctggacgatcagcagcgcatcgtcgacaccttgtttatgaaaggactgaccgtcttcgcccgaccgcaaaaaattcccgcaattaccggtatgcatgcgggtgatttacagcccgatgtgatctttccccatgatccactaagtcagaatgctctaagtttggcgcttaaactgaaacgtggataatttcgttgtgaatgttacttgcttgcgaagttatcattttgaaacctaaatcaggtaatcacgcccatgaaacctcgtcagcgtcaggccgccattctggagtatctgcaaaagcagggtaaatgcagcgttgaagaattggcgcaatactttgacaccacaggcacaaccattcgcaaagatctggtcattctggaacatgccggaaccgtcattcgtacttatggcggagtggtgttgaataaagaggaatccgatccgcctatcgatcataaaacactcatcaacacccacaagaaagagctgattgcagaagctgccgttagttttatccatgatggcgatagcatcattcttgatgctggcagtaccgttttgcagatggttcccctgctcagccgctttaataacatcacggtgatgaccaacagcctgcatatcgtcaatgcgctatccgaactggataacgaacaaactatcctgatgccaggcggaacgtttcgcaaaaaaagcgccagttttcacgggcaactggcagagaatgccttcgagcatttcaccttcgataaattgtttatgggcaccgacggcatcgatctcaatgcgggcgtaaccacctttaacgaggtttataccgtcagtaaggcaatgtgcaatgccgcgcgcgaagtgattttgatggcggacagtagtaagtttggccgtaaaagccccaacgtagtttgcagtcttgaaagcgtcgataagctgattaccgacgcaggtatcgatccggcgtttcgtcaggcgctggaagagaaagggatcgatgtgatcataaccggagagagcaatgagtgaagcactactgaacgcgggacgtcagacgttaatgctggagttgcaggaagcaagccgtttaccggaacgtctgggcgatgattttgttcgcgccgccaatatcatcctgcactgtgaaggcaaagtggtggttagcggaattggcaaaagcggccacattggtaagaaaatcgccgcaacgcttgccagtaccggcactccggctttttttgtccatccggcagaagcgctgcacggcgatctggggatgatcgaaagccgcgatgtgatgctgtttatctcttactccggtggcgcgaaggaactggatctgattattccgcgtctggaagataaatctatcgcgctgctggcgatgaccggcaaaccgacgagtccgctgggcctggcggcaaaagcggtgctggatatctccgtagaacgcgaagcctgcccgatgcaccttgcgccgacctccagcaccgtcaataccctgatgatgggtgacgcgctggcgatggcggtcatgcaggcgcgcggatttaatgaagaagattttgcccgctcccacccagccggggcactgggcgctcgcttgctgaataaagtgcatcatctgatgcgccgtgacgatgccatcccacaggtggcgttaaccgccagcgtgatggatgcgatgctggaactcagccgcaccggtctggggctggtggcggtatgtgacgctcaacaacaggtacaaggcgtctttaccgacggcgatttacgtcgctggctggttggcggcggcgcactcaccacgccagtcaatgaagcgatgacggtcggcggcaccacgttgcaaagccaaagtcgcgccatcgacgccaaagagatcctgatgaagcgcaaaatcactgccgcaccggtggtggatgaaaacggcaaactcaccggcgcaataaacctgcaggatttctatcaggccgggattatttaatccttcaatcccagacgtttcgccagccgatgcaggttggcgacgtcggtttccagcatccgcgcgcaggcagcccagttgtgatgattttgtgccagtgcctgacgaatagtttcacgctggaacgcttctgtcgcttcacgcaggttttgcttaacaacgggcaccgccgccacttctggcgtcggcaacgtcacctcaggaaaagcaaaatgttgcgcctcaagaatcacttcatcgccgctgcgggtggctctcgccagaactaccgcccgatgaatagcatgttccagttcgcgcacgtttcccggaaaactgtagtgttgcagtaaatttcgcgctccggcacttaataccacgcgggagagcccctgccgcaaacgacactgctcgcagaaataccccgccagcagaatgacatcatcgccccgctcacgcagcggcggcacgctaagtggaaacacgctcaggcgatgaaacaaatcggcgcggaatcgccctgccagcacctcttcgcgtaaatcgcggttagtcgccgccagcacgcgcacatcgacccgcaaacaacggtcatcgccaacgcgctgaatatcgccatactgcaacaccctcagcagcttggcctgcaatgccaagctcaactcgccgatctcatccagaaacagcgtgccgttatccgccatttcaaacttcccgctgcgattactgatagcgccagtaaacgctcctttcacatgcccgaacaactcactttccgccacactttccggcagtgcagcacagttgagatagaccagcggattcaccgcccgtgggctggcttcatgaatcgctttcgccaccagctccttaccggttccagtctcaccgctgatcaggacgttgagatcggacgccgccacaatctcaatctcttttttcagttgcgtcatgccaggggacaagccaatcatctgcgtctgtttcaccgcttcaaacggcgtggcatcgcctggcagcatattctggctttccagttgttcaatcagcaacgcattgcttaacgctcccgccgccagcgcagcaatcagccgtagctcttcgtcgctgaaaacatcgaactgatcgggctgcatcccgtcgagcgtcagtgcgccgatcaggttttgcccggcaaacaatggcagaccaacgcaggcgtgaaccttcagactctcctgcccaggaatcaaaccgtcatagggatcgggcaattcgctgtctgcgggaaagcgcaccacatccccggcgcgggcaatcgcttccagccgtggatgcccttccagcgcaaagcgtctaccgagtacatcctttgccagaccgtcgatggcaagcggaataaactgccggctatcgtaacgtagcaacgcagacgcatcgcactccagcacctgacgtagcgtggtgatcaggcgctgaaaacgatcctggtgaccaatcccacgctgcaattcgatggcgatattcgccagcacatcaacggaaaaactcatctttgcctcactgtcaatttgactatagatattgtcatatcgaccatttgattgatagtcattttgactactcattaatgggcataattttatttatagagtaaaaacaatcagataaaaaactggcacgcaatctgcaattagcaagacatctttttagaacacgctgaataaattgaggttgctatgtctattgtggtgaaaaataacattcattgggttggtcaacgtgactgggaagtgcgtgattttcacggcacggaatataaaacgctgcgcggcagcagctacaatagctacctcatccgcgaagaaaaaaacgtgctgatcgacaccgtcgaccataaattcagccgcgaatttgtgcagaacctgcgtaatgaaatcgatctggcggatatcgattacatcgtgattaaccatgcagaagaggaccacgctggggcgctgaccgaactgatggcacaaattcccgatacgccgatctactgtacagccaacgctatcgacagcataaatggtcatcaccatcatccggagtggaattttaatgtggtgaaaactggcgacacgctggatatcggcaacggcaaacagctcatttttgtcgaaacaccaatgctgcactggccggacagcatgatgacttacctgacaggcgacgcggtgctgttcagtaacgatgctttcggtcaacactactgcgacgagcatctgttcaacgatgaagtggatcagacggagcttttcgagcagtgccagcgttactacgccaatatcctgacgccgttcagccgcctggtaacaccgaaaattaccgagatcctgggctttaacttaccagtcgatatgatagccacttcccacggcgtggtatggcgcgataacccgacgcaaattgtcgagctgtacctgaaatgggcggctgattatcaggaagacagaatcaccattttctacgacaccatgagcaataacacccgcatgatggctgacgctatcgcccaggggattgcggaaaccgacccacgcgtggcggtgaaaattttcaacgtcgcccgaagcgataaaaacgaaatcctgactaatgtcttccgcagtaaaggcgtgctggtcggcactagcacgatgaataacgtgatgatgccgaaaatcgccgggctggtggaggagatgactggtttacgcttccgtaacaaacgcgccagtgctttcggctctcacggctggagcggcggtgcggtggatcgtctttccacgcgcctgcaggatgcgggtttcgaaatgagccttagcctgaaagcgaaatggcgaccagaccaggacgctctgaagttatgccgtgaacacggtcgcgaaatcgcccgtcagtgggcgctcgcgccgctgccgcagagcacggtgaatacggtagttaaagaagaaacctctgccaccacgacggctgacctcggcccacggatgcagtgcagcgtctgccagtggatttacgatccggcaaaaggcgagccaatgcaggacgttgcgccaggaacgccgtggagtgaagtcccggataacttcctctgcccggaatgctccctcggcaaagacgtctttgaagaactggcaagcgaggcaaaatgagtaacggcattgtgatcatcggtagcggcttcgccgcccgccaactggtgaaaaatattcgcaaacaggacgccactattccattaaccctgattgccgccgacagcatggatgagtacaacaaacctgacctcagccatgttatcagtcaggggcaacgtgccgatgaccttacccgccagacggcgggtgaatttgccgagcagtttaatctgcacctgtttccacaaacctgggtgacggatatcgatgccgaagcccgtgtggtgaaaagccagaataatcagtggcaatacgacaagctagtactggcaaccggtgccagtgcctttgtcccgcctgtgcctgggcgtgagttaatgctgacgttaaatagtcagcaagagtatcgcgcctgtgaaacgcaactgcgggatgcccgacgcgtgttgattgttggcggtggtttgattggtagcgaactggcgatggatttttgtcgtgcaggcaaagcggtcacgctaatcgacaacgctgccagtattctggcgagcttaatgccaccggaagtaagcagccgcttgcagcatcggttgacggagatgggcgttcatctgctgttgaaatctcagttacaggggctggaaaaaacggattctggcattcaggcaacgctggaccgccagcgcaatatcgaagtggatgcggtaattgccgccaccggactgcgcccggaaaccgccctggcacgacgcgccgggctgacgattaatcgcggcgtttgcgtcgatagttatctgcaaaccagtaataccgatatttacgcgctgggcgattgcgcggaaattaacggtcaggtattgccgttcctccagccgattcaacttagcgcgatggtgctggcaaaaaatcttctcggcaataacacgccgctgaaactcccggcgatgctggtgaaaatcaaaacgccggaattaccgctgcatctggcaggcgaaacccagcgtcaggatttacgctggcaaattaataccgaacgccagggaatggtggcgcgcggcgttgacgatgctgaccagcttcgcgcctttgtggtcagtgaggatcggatgaaagaggcatttggattgttgaaaacattgccgatgtaagtgggctactgtgcctaaaatgtcggatgcgacgctggcgcgtcttatccgacctacggggacgcatgtgtaggccggataaggcgtttacgccgcatccggcaatggtgtccaaatgcaacacgttttatccgttctggacttcacccgctaaccaacgcgccgcagcaataaccccctgccccagagacaaaccgccatcacccgccggtaaactctgtggaaagagcaatgtgaaatcagcgagataatgcgccagacgtgcacgcagcaaacggttatgaataaccccgccgctaaataccagcgtagtgataccacgcatcgtggcctgctcacgcatcaacgcggcaaaaccctgcgccagcgtatcatgaaacgcccacgcgcgttgattaaccggtgcctgccagttcagccactgctgccagaaagtggcgagatccagttgattgtccacccgcggcattgtcaccggatgcgtcactccgtggcaactggctgcgagcgcctccagagcacaagccgcttcaccttcataacttaacgtggctggcgcacagcccagtgccgccgccactgcatcgaaaaaacgcccacagctactcgccagcggcgcgttaattccacgctcaatggcccgcgccagcacgctccagttttgctgttgcacacttgctgtttcagagtaattctgccactccggcacaaagcgcaggcactgcgccagcaggtttcgccacggctgcttcgctgccaaatcgccacccggaagcgccactgcaggcaagccgcccaggtgctcacattcgcgatagttcacccgcaggcactcgccgccccacaaagcgccgttctcccccataccgataccgtcgagcgtcaaagcaatgacatcaccgccatccagcggccactgatgctctgccagacacgccgctgcatgggcatgatgatgcagtaccgtttgcgtcggcagattcatttcacgcgcccactggctggagacatagcccggatgcgcgtcatgcacaacgtattgcggggtaaaatcgtagatgttttgcatcaggcgtaacgcttcgcgccactgcatctggatgccatcgtcacttaaatcgcccagatgctgactcaacaccgcttgttcaccgcgcaccaggcagaaggtatttttcagatccgcgccgagacacagcacaggcggaacatttttaaagcccggaggcaaagccagcgcatccggcacatacccccggctacggcgcagcatttcgccgctttcgcgcaccacgctatcatccatccgctgcacgatgtcgcggttatgtatcaagaatccgtcggcaatgccctgcaaatccgccagcgcctgttcgttgctgatagctggtggtttaccgctcaggttgccggaggtcatcaccagcgggcattgcagttcctgtaacagcaaatgctggagcgggttcgcaggcaacattaccccgacttcgttaaggtcaggggcgatatcatcacaaagctcaggaacgtattttttatccaccagcacaatcggcgcggcgggcgtggtaagcaactggcgcgcagcgtctggtaaaccgtcagccactggcaacatgaccgccagcggtttcgccgggcgatgtttgcgcgcccgaagtgtcgccaccgcgttactgttacgtgcatcgcaggcaagatgaaatccgccaatccctttgatggcgacaattttgcccatttttaactgtgcgatagctgcctgtaatgccgcctcttgttccgcatgttcaccatgacttacccattcaagatgcgggccacactccgggcaggccaccggctgggcgtggaagcgacgatcgagcgggtcacggtactctttgtcacaggccggacatagcggaaacgccgccatcacggtaaacgggcggtcgtaaggcatggcgcgaataatggtgaaacgcgggccgcagtgggtacagttgataaacggataacgataacgccgttcgcctggggtattcatttcggcaaggcaagcagggcaagtagcggcatcgggaacaatttgcgtattcatggtgccgcctgtgctctggcgtatagtgaactcggtgggcagttgactccagataaacggctcacgctcgacgctatcaatacgcgccagcggcgggcagtgctgatacaattgaacaagaaacgtttccgggtcttcccgcagccggacttctacgccatcgccgtcattacagacatcgccgtgaagatttaattgctgtgccagctgccagacaaacggacgaaaaccgacgccctgcactttgccacgaatacgcagttggacaccgcaagatgtgttttttgccattgagttattcccgccatcatgaattgcgtaacccgccctgccggacacgacagcgtcgcatccggcagtcacaggtcggcgataccgcccgctccgtattctacgaatatttccgggaattcctttgatgccagaacagttctgtaagatttttagaacatcagcgccgtacggcggcgtttttctgcgctcagttgttcaagtttattacgatcgacacaaatcagcgcatgagtcgggcaagccgccatacacgccgggccgtcttcacgatggttgcacaggtcgcatttattggcttcggctttgtcagcccgtacattcagacccgcgccgctgttgcggatcaccggacgtaccaccacttccatcgcaccatacgggcaagccacaacgcaggttttgcaaccaatgcaacgttcctgcatcacatgaacaaaccctttatcacggctgatagcaccattcgggcagacgttagcgcacggtgcatcttcacactgacggcaaactgtcgccgtggaaatgttcacacctttaatgacatggatacgcggtaaaaaagtttccggggtcaggcttgcacagtcctgattttcctgatgagaaaccacgcacgctacttcacaggtacggcaaccaatacatttactcgcgtcagcaatgatgaaacggttcatcaaattctccagcaatgacagttaatgcgccgatacattcacaaatcatgccagtttttaatttactgttatttaaggaaattaatttctgtaatgcaggaaaaacgatgtcatcgacactagtgacgatgacatgtgatgacaatgtttatcggctaggagcaatgagactgtcgcggcggatcagttttccgctgaaggttttcggcggactgaaatccccgccatcgagcataaaaatcagccgtccaataatttcctgaatcatctcagtcaccggaatttttacgctggagagcgccggaacggtgtagggggcaatagcgatatcatcgaatccgataacactcacctgctctggcaccgctacgccgcgctcgtgtaacgctttcatcgcacctatcgccatatcgtcgttactggcaactaacgcgctaaatttagccccacgttcgagcaacatttctaccccttcggccccgctggcaggcgtccatttaccgttagcgataagtttttcattgagcgcaataccatgctgcgccagcgcgtctttatacccggcaagacgttcaatgttggtgggggaatccatgctgccggtaaggaaagcaatctcctgatgcccggcgtttatcaactctgccacggcgttaaaactggtctgtttatgatcgcaccagacgctatggctgctgtttttgcgcaggcggcgattaagcaccattatcggctgactgtgcgcgtcaatgatgtcatcgatctcatccacgcttaaaaaacgcgggtaaatcatgatcgcgtcgcagcgcagatccagcagatactgaatcgcctggcgctcttcttctgcgctgtgtttaccatctgccaatagcaactgccgccctttctcttccgccattcgcgcggcatgaaagagtaattcactaaaataaatgccgtggtaaagcgtgttggtcactaccagccccagcgtctgagtactcttcgcgctcagattgcgcgccagcaagtttggacggtaaccgctctcttctaccgcctgaaacacgcgatctttagtctcctggctgacgtagccattaccactaagcacgcgggaaacggtcgctttactaaccccggcgcgcttcgccacttccagcatcgtcgtcatcattttcatccctttacacgcaatcaacgcagtgtactgcaccgtttgccgattgtccttgcacaatcggcgggaaaaatattcaggtgaccggtttcacaaatataaaaaatgaacaattcactctcttgcttatttagtgacaactattcatgattttgtgaaaccggtttcttaattccgtttcagcatcggcatttttccgtcacgtcgactgataacaactacatctaccctactgataacaggataaaatccgatggccaaaaattatgcggcgctggcacgcagcgtgatagcggcactgggcggcgttgataacatcagcgcggtcacgcactgtatgacgcggttgcgctttgttatcaaagatgatgcacttatcgacagcccgacgttaaaaaccatccccggcgtgctcggcgtggtacgtagtgacaaccagtgtcaggtgattatcggcaataccgttagtcaagcctttcaggaagtcgtcagcctgctgccgggagatatgcagcccgcacagcccgtgggtaaacccaaactcacgctacgtcgcattggtgcggggatcctcgatgcgctgatcggcaccatgagtccgctgatcccggcgattatcggcggaagcatggtcaaactgctggcaatgatcctcgagatgagcggcgtgctgacaaaaggaagcccgaccttaaccattctgaatgtgattggtgacggtgctttcttcttcctgccgctgatggtcgcggcatctgccgccatcaaatttaaaaccaatatgagcctggcgattgccatcgcgggtgtgctggtacatccgagttttattgaactgatggcgaaagcggcccagggtgaacatgtcgaatttgccctgattccggtcaccgcggtgaaatacacctacacggtgatcccggcgctggtgatgacctggtgcctgagttatatcgaacgctgggtggacagcattacaccggcggtgaccaaaaacttcctcaaaccaatgctgattgtgttgattgccgcaccgctggcaatcctgctgattggcccgattggtatctggatcggtagcgccattagcgcgctggtttacaccattcatggttatctgggctggcttagtgtcgccattatgggcgcgctgtggcctctgctggtaatgaccgggatgcaccgcgtctttacgccaaccatcattcagaccattgccgaaaccggcaaagaagggatggtcatgccgagtgagatcggcgctaacctgagcctgggcggtagtagtctggcagtggcgtggaaaacgaaaaacccggaactgcgtcagacggcgctggctgcggcggcaagtgccattatggcggggatttccgaaccggcgttatatggcgtggcgatccgcctgaaacgtccgcttatcgccagtcttatcagcggttttatttgcggcgcggttgccggtatggcggggcttgccagccacagtatggcagcgccggggctatttaccagcgtgcagttcttcgatccggcgaatccaatgagcatcgtctgggtgttcgcggtcatggcgctggcggtggtgctgagctttatcctcacactgttgctcggctttgaggatattcctgttgaggaagcggctgcccaggcgcgaaagtatcagagcgtacaaccgaccgtcgccaaagaagtaagtcttaattgaggatgaaaatgagtgtatttccagaaagttttttatggggcggcgcgcttgccgccaaccagtctgaaggtgcgttccgtgaaggtgacaaaggtctgaccactgtcgatatgatcccacacggcgagcatcgaatggcggtgaaactggggctggaaaaacgttttcagttgcgagatgacgagttttatcccagccatgaggcgacggatttttatcatcgttataaagaagatatcgccctgatggcagagatgggattcaaggttttccgtaccagtattgcctggagccgtctctttccgcagggcgatgaaatcacgcccaatcagcagggcattgctttttatcgttctgtctttgaagagtgtaaaaagtacggtatcgaaccgctggtcacgttgtgccacttcgatgtgccgatgcatctggtcaccgaatatggctcctggcgtaaccgcaagctggtggagtttttcagccgctacgccagaacctgctttgaagcatttgatggtctggtgaaatactggctaaccttcaatgaaatcaacattatgttgcatagcccgttctccggcgcgggtctggtgtttgaagaaggtgaaaatcaggatcaggtgaaatatcaggccgcgcatcaccagctggttgccagtgcgctagccaccaaaatcgcccatgaggttaacccgcaaaatcaggtgggctgtatgctggcgggcggtaacttctacccttacagttgcaagccggaagatgtctgggcggcgctggagaaagaccgggaaaacctgttttttatcgatgtgcaggcgcggggcacgtatccggcttactctgcccgcgtattccgcgaaaaaggggtaaccatcaacaaagcaccgggcgatgatgaaatcctgaaaaacaccgtcgattttgtctctttcagctattacgccagccgctgcgccagcgcggagatgaacgccaacaacagcagtgcggcgaacgtggtgaaaagcctgcgtaatccgtatctacaggtgagcgactggggctggggaattgatccactcggtctgcgtatcaccatgaatatgatgtacgatcgttatcagaagccgctgtttctggtggaaaacggcctgggcgcaaaagatgaatttgctgccaatggcgagattaacgacgactatcgcatcagctacttacgcgaacatatccgcgcaatgggcgaagcgattgcagacggcattccgctgatgggctacaccacatggggctgtattgatttagtttccgcctctacgggtgaaatgagcaaacgctacggctttgtctttgttgaccgtgacgacgcaggcaacggtacgctgacgcgcacgcgtaagaaaagtttctggtggtataaaaaagtgattgccagtaatggggaagatttagagtaagtaacagtgccggatgcggcgtgaacgccttatccggcctacatgtcgcacgaaccatgaaggcccgataagcgcagcgcatcgggcaatttagcatttggcatcagagctggttcaccccatcaagaacatccctgtcctgattccttaatgaaaaattactcttcttccaccgctaactgcgcgaagccgccatttccttcccagccttccagtcgttgataaacggtttctaccgcatctttaatcggctgggtcatcgggtagtaaaagccgacgatatccggctgaatgccgaggaaaatcacttcgccaatatcttctttcaactggtcgataaggtaattcaacggcatgttatgggtagtcatcataaacatctcggcgatatcatccgggtcgatgatgcggatctcgccggggtttagccccatatccgtggcgtcgacaatcagcagtcgtgtcgggcgcagttcacggatagcgacgatgtcgttttccggtgcgctaccgccgtcaatcaccacccagttacctttcggcgcggcggcgcacttttccgccagcagcggacctgcgccatcatcgcccatcatgctattgccaacacagagtaaaacgtcagtcacgcagtctcctcaccatcaaatagatggcgttttcctgatgaatatcatgcagcatacttaacagcattgtactccattcctgctgctggctagtttgcgctgcccgggctttatcgaatgcgttggccagcatcggcacatggttaatgtcgatgacgatctcaccatatttcggcacgccttccattttgcggcgggcttcactgcctgcctccagagtggcaatccatgccagatattcatcccacgggcaggtgagcgccgcttccaggcaatcgataaccccaaggtggtgaccaatcgccaggctgtaatagaccacctgctgcgcctcggcgggcgtggcatcgttctcatcaataaatttatggctcagttgactgaacaccaccttttcactcatcggatacgcgcctcttcaacaacatgattcagatggctgacaatctcgttcagacgcggatcgttttccgcttccagccagcgtgcaacctgttcttcgccctgccctaactgtgtaaggtaatcatcggcaatctgacgaccgtaacgataacccgccaggcgacgtgcttcgcgatccactttcacgcgcagcggctgcaccatatcaccatgcaggatctccgccggttgttcatccagttcacccggcccacgggcgtgaattttctgctccagcaggccgagcgccattgcaaagccgtacagcgtggcggcaggcgttggcgggcagccagggatataaacatccacagggacaattttatccgtaccgccccacacgcagtagagatcgtggaagatcccgccactgttaccgcaggcaccgtaggagatacaaattttcgggtccggcgcggactgccacgcacgcagcgcaggggatcgcattgcacgggtgaccgcgccggtaaacagtaaaatatccgcatgacgcggactaggaacgactttaatgccgaagcgttctgcatcaaacagcgggctaagcgtggcgaaaatttcgatttcgcaaccgttgcagccgccgcagtccacgcggtaaacataggcagaacgtttgatttttttcagtaagctcgccttcatgctggcgatggattcatccaccgtcatggggaccggaatgccgttggcgtcacgggggcctaataaattgctcatcagatggcctctttcatatggcgagtcagttcaatacggtcggacggcaccaggcatttctggcgcttacattccgggcaagtctcaaagctttcgcggtggttttccgcgcggctgtcgccgttgtgcttaagcagcgcaatggcgtagtcgatctctttctggacggcgaaaggacgattgcagacgcggcagttgcacagcgcgaagcgggactgttgcaggaagtcttctttcttccacaccgccagttcgtactcttggctcagtttgatcgccgccgtcgggcagacttcttcgcagcgtccacagaagatgcagtgcccaagattaaactcccaggcaagctctcctgtggcgaggtcagtttcaaccgttaaggcgttactcgggcaggcattgacgcaggccgcgcagccgatgcactgctgcgggttctgctctggcttaccacggaagtttttatcaaccgcaatcggctccagcggataagagctggtcgccgtgccggttttgatgacttttttgataaaggtaaacatggcgattccttatttcagcgggctgtttttacgctcaatgctgtaacgctcgagttctttgtacggcaccactttgctcttcttcttacgcacatcgaccacggtcatgcggtcggtacaggagtagcaagggtcgaggctaccgataatcagcggcgcatcggaaacggtgttgccgcgcagcatgtagcgcagggtcggccagttcgcgtaggtcgcggcacggcagcgccagcggtacagcttctggttgtcgccggtcatgctccagtggatatcatcgccgcgcggcgcttcggcaaagcccagcgcaaagcggtgcggaatgtaggtaaagccttccaccatcagtgggccacccggcaggttatccagaccgtagtcgatcatgttcagcgcggtatagacttcgttgatacgcactttcagacgggaaataacgtcgcagccctgctcgctgtggacttccattggcagcaggccatagccgacaaacgggtgatcggcgcgggtatcacgggcgtgaccgctggcacggaccatcgggccgacgttactgaagtcgcgagcgatttccgggtccagacgaccaatgccgacagtgcgctgttccatgttcggagtgctcagcagcacatccaccagctcctgcacttcacgacgcatctgttgtgccagctggcgggtctggatcatgtcgtctttcagcagatcgcgacgaatcccgccgatcaagttcaggccgtaggttttacgcgcaccggtaaggatctctgccattttcatggaggtttcacgcacgcggaagaactgcataaagccggagtcgaagccggtaaagtgacaggccaggccaaggttgagcagatggctgtgcaagcgttctacctccagcagaatggcgcggatcatctgcgcacgttctggcacctgaatacccatcgcgttttccacgctcgtggtgtaggcggtgctgtgggcaaagccgcagatcccgcacacacggtcagagaggaaggtcacttcgttataacccatacgggtttccgccagtttttccatgccgcgatggacgtagaacagacggtagtcggcgtcgataatgttttcgccatcgacgaacagacggaagtggcccggttcatcagaagtgacgtgcagcggaccaatcggcacgacgttgtttttcttgtcgcccagttcgttgatgaactcgtaggtttcagcatcggtggtcggtgccggacgctgacgataatccatgctgtctttacgcagcggataaagttcatccggccagtcatccggcagcaccagacgacgttcatccggcagaccaaccggaatcaaaccgtacatatcgcgcacttcacgctcgccccacaccgccgccggaacgcgcggcgtcacggacggatattccggtttgttggcgtcaacttcgacgcgaaccgtaatccaacacttagtgcccttctccatgctcagcacgtagtaaacggcgtaatgaccattcagtttgcgttcgtcgttaccaaacagcacgctcagccagccaccctgtttgtagtaaagaaactccaccacttccggcaggtagttcacctttacggtgacagtcagctgatctttggtctgccaggcgtggtccagcacgacgcccggaaatgcctcattcagcgcggcgagataatgttgacctaatttttcttcagacatgctcaaactctctttaatcacgccgccagcaaggagacgaacgctaaaaatgcaaagccaaacccagcccaggtaatgcgcggagtaatatcaagacgcagacgggccatgctgttttcgaacagcgcgataaccaggacgccgaccaccagttttacgatggcaatcaccagcgccagcagcagtccaccggcggtgaaggtttccatttgtccccacggaataaacaccccgacgaacatctgcaacaccaccagctgtttcaggctgataccccatttcatgacgccaaagccgctgccgctgtattcagagagcgggccttcctgcagctcctgctcggcttccgccaggtcgaacggcagtttgcccatttcgataaaggtggcgaacgcacaggcacaaagcgccagtaccagcgggatgctctggctcagcggccagtgataaacggtgtcggtgatgttgctgatgttggtggaaccggcaacctgtgcggcaacccacagaccaagcagcagcatcggttcgaccagcacgccaagcatcgcttcacggctcgcgccgatagcggtaaacgggctaccggtatccagaccagaaatggcaaagaagaaacgcgcgatggcaaagagatacagtaaggtgatcaaatcacccagttgcggcagcggagaaccgacggtcaccaccggcagcgcagtagcgatagtcagcatgacgcccaccatcacatacggcgtcaggcggaacacccagccggaggcatccgggccgacgctctgacgccccagcagtttgataatgtcgcgatactcctgcaacacgcccggcccgcgacggttatgcaagcgggcgcgcgccacgcgggttataccggagagcagcggcgcaacggcaaataacaccagcgcctgaattaacggatataaaacactcattctcaggctcctcgactaacaataatcaccaccagtaccgccagttcaaccagcgccatccggcggaacagcaacgcactcccctcgcactgccagcccggcaccagagacaccggattcagccatttgcgtagtttcagcaccggcgcaaacgcctgtttcaccggcatggcaaaaccgtgagcggtaatcaccatacttttttcgtggtcgtaaccgcacacccaggccgcaccgcgggaacggcttggcaaacgatcgcctttgcaaatcgccataatgatgaatggcagcagcgggcaggcaatcagcagcaacgtgatcatcggttgagaaacggtggtgttagcaggctccagcggcagaggtacagcagcagagagcatcggcagtagccacggcgcagcaacaccgccaattacgcagcaaatcgccagtgccactacgcttacgctcatcaggagcggcgcacaggtggcgttttcggcttctttggtgcgcggcgcgccgaggaacgtgacgccatagactttcgccatacacatcaccgccagcgcaccggtaattgccagccccacagcgagcagcggccccagcagacgggcaacaaacgcgccactattgctcagtttgaaaaaactttgatagataacccattccccggcaaaaccattcagcggcggcagcgcagccattgccatcagcccgactaacatggcgatggagataaccggcattttcttgccaataccaccgagtttttcgatatcgcgatgaccggtacggaaccagacgctccccgccccgaggaacagtacgcttttgaacaggctatggttaagcagatggtacagaccaccgaccaggccaagagcaatcagcgccggttgttcgagcgcgatacccgttacgccagcgcccagccccagcaggatgatgccgatattttccagggtgtggtaagccagcaggcgctggatgttgtgctccaccagcgcatacagaccaccgacaaacgcggtgatcatgccgagcaccagcagcgcgatcccccaccacagcggtgcattaccgcccagcagactcagggttaaaatgcccagcaggccaattttcatgactaccgtagaaaacaacgcggcagctggcgcagaggcgttcgcatgtgcctgcggcacccagccgtgcagcggaataatcccggccagcaggccaaagccaatcactccgagcagccagatatcggaaccgagcggcagctgttgcatacgcatatccagcaggcgcagatccagcgtgccgtaacgctgccacagcagccagcaagcaatcgccagcagcagagtgccaagacgccccagcgcaaaccacagtttgccctctttgctgttgctggtgaggaacaccgcgcacagggccatgatttcggccattaccacgaacatgccgaggttgctggcaatgacggcgcagacggcggcagccatcaacatattgatctgcaagccgttgcacttcacctgcgcgtggcgatgccagtcaatgttgtagaggctgacaaacagaccgcacagaccgagcgtaatcagccaaatcgcgttaagcggagagatttgcacatcgtagcttaccaggctcagcgcaccgctcacgccaaccgcgccagtcagtacagtgaagcccgcggctgccgtatacagactaccaaccgcgccgccaattccagctatccagccacttaacgctttttgaaaagaaaagagaaatgccagaacagcggcggcgacaaaccacgccacgccgctattgatcagggaaattgcgctcatttagcctctccactttgagcctgctgaaacaaggtgagatcgccaaagtccgtgttaaaggtcagctcacgcttacgtttgctgacgcgggcgatatcggtgttatccaccagatgcagggctttagtcgggcacatccgcacgcaggccggaccttgttcatcaaagctacaaaggtcacatttgacggcgatcgcgcgaatacctggcacccagtcaagcaatgtgctgacacgcgccggagcaggcggtgccggtggcgctttcggggtattggcgtttgccggaatatccagcggacggctgccggaaaattcaattgcgccaaacgggcaggcgatgccgcacagcttgcagcttacgcacaggctttcattcaactgcacggccccatcgacgcgggtgatggcgttaaccgggcagaccaccgcgcagggtgcatcttcacagtggtgacagagctgcggcgcagattctttttcattcagcatcactctcaggcgcggcatactttgcaggccgtgctggcgatgcgtctcactacaggcggcctcacaagtgtggcagccgatacagagcgtggagtcagcaattacaaaacgattcaccaggcattcctcaggtgattgtcatttttgacgaaaacatgccgatgaaatgtcattttcgacactcatcgacacgcccatccccaaacaggcgtaacgcctgcaaaacgggcaaagcctcagctcatgctgccgggctttgtccctttaccagttggcttaaattcaccggcacattgttttcaatagcggtgtataagctgtcgtaaacgccagcgattttttcgagatagtgttccagaacctgttcgcgatcgcggatgttgaccttgccatcaatcatgccgtcaatgctcagttgcgcctgcgcaatccgctgtttgtcttcgccatcttttgtttcgacgtaatactcgatggtgtggctgttaaagccatccgccagggtgacgtaaatgcgaaaatgttcaaaaaggacgaaacagagttctttgtccggcgcgcagctcatggcgtgatgcaggcgcgctttgcttaacgtgatcccctgaaccaggctattgcagtagatgtgccactggtcctgtaggcgacgatgccgctgtgcgatgtaatcggctttctcgcttatttcccaaatagtcattgtcaggttacccgtttaacagagatgccagctttaagcattttttgtgccaacttttaatttattgttattaaagagatttttaagctaaagatgaatttcgtcgccgtgtcgacgtgtcatttcgacatcatcgacattattcaccgcagggataatcaacactggcacaattattgcttgtagctggcaatagttaatgggaggcgatatgcacgaaataaccctctgccaacgggcactggaattgatcgaacagcaggccgcaaaacacggcgcaaaacgcgtaactggggtctggctcaaaattggcgcattttcttgtgtcgaaaccagctctcttgccttttgttttgatctggtttgccgcggcagcgtggcggaaggttgtaaactgcacctcgaagaacaagaggccgaatgctggtgtgaaacatgccaacagtatgtgacgctactgacccagcgcgtccgccgctgtccacagtgtcatggtgacatgctgcagattgtggcagacgacggtttacagattcggcggatagaaatagaccaggagtgagcgatgtgtacaacatgcggttgcggtgaaggcaacctgtatatcgagggtgatgaacataaccctcattccgcgtttcgtagcgcgccatttgccccggcggcacgcccgaagatgaaaatcaccggcattaaagcgcctgaatttacccccagccagactgaagaaggcgacctgcattacggtcatggcgaagcgggcactcacgcaccgggcatgagccagcgtcggatgctggaagtcgaaattgacgtgctggacaaaaataaccgtctggctgaacgcaaccgcgcgcgctttgctgcccgcaagcaactggtgctcaacctggtttccagccctggttccggtaaaaccaccctgctgacggaaaccctaatgcgcctgaaagacagcgttccgtgcgcagttattgaaggcgaccagcaaaccgtgaacgatgccgcacgcattcgcgctaccggcacaccagcgattcaggtgaacaccggtaaaggctgccatcttgacgcacagatgattgccgacgccgcaccgcgtctgccactggacgataacggtattctgtttatcgaaaacgttggcaacctcgtatgcccggccagcttcgatctcggtgaaaaacacaaagtggcggtgctttccgttaccgaaggtgaagacaaaccactgaaatatccgcatatgtttgccgccgccagcctgatgctgctcaacaaagttgacctgttgccgtatctcaactttgacgttgaaaagtgcatcgcctgcgcccgcgaagtcaatccagaaattgaaatcatccttatttccgccaccagcggcgaagggatggaccagtggctgaactggctggagacacagcgatgtgcataaggtaaaactggctggagacacagcgatgtgcataggcgttcccggccagatccgcaccattgacggcaaccaggcgaaagtcgacgtctgcggcattcagcgcgatgtcgatttaacgttagtcggcagctgcgatgaaaacggtcagccgcgcgtgggccagtgggtactggtacacgttggctttgccatgagcgtaattaatgaagccgaagcacgcgacactctcgacgccttacaaaacatgtttgacgttgagccggatgtcggcgcgctgttgtatggcgaggaaaaataatgcgttttgttgatgaatatcgcgcgccggaacaggtgatgcagttaattgagcatctgcgcgaacgtgctagtcatctctcttacaccgccgaacgccctctgcggattatggaagtgtgtggcggtcatacccacgctatctttaaattcggcctcgaccagttactgccggaaaacgttgagtttatccacggtccggggtgcccggtgtgcgtactgccgatgggtagaatcgacacctgcgtggagattgccagccatccggaagtcatcttctgtacctttggcgacgccatgcgcgtgccggggaaacagggaagcctgttgcaggcaaaagcacgcggtgccgatgtgcgcatcgtttacagcccgatggatgcgttgaaactggcgcaggagaatccaacccgcaaagtggtgttcttcggcttaggttttgaaaccactatgccgaccaccgctatcactctgcaacaggcgaaagcgcgtgatgtgcagaatttttacttcttctgccagcacattacgcttatcccgacgttgcgcagtttgctggaacagccggataacggtatcgatgcgttcctcgcgccgggtcacgtcagtatggttatcggcaccgacgcctataattttatcgccagcgattttcatcgtccgctggtggttgctggattcgaaccccttgatctactacaaggcgtggtcatgctggtgcagcagaaaatagcggcccacagcaaggtagagaatcagtatcgtcgagtggtaccggatgccggtaacctgctggcgcaacaggcgattgccgatgtgttctgtgtcaacggcgacagcgaatggcgcggcttaggcgtgattgaatcttctggcgtgcacctgacgccggattatcaacgattcgatgccgaagcacatttccgcccggcaccgcagcaggtctgcgatgacccgcgcgcgcgttgtggtgaggtattaacgggcaaatgtaagccgcatcaatgcccgctgtttggtaacacctgtaatcctcaaaccgcgtttggtgcgctgatggtttcctccgaaggagcgtgcgccgcgtggtatcagtatcgtcagcaggagagtgaagcgtgaataatatccaactcgcccacggtagcggcggccaggcgatgcagcaattaatcaacagcctgtttatggaagcctttgccaacccgtggctggcagagcaggaagatcaggcacgtcttgatctggcgcagctggtagcggaaggcgaccgtctggcgttctccaccgacagttacgttattgacccgctgttcttccctggcggtaatatcggcaagctggcgatttgcggcacagccaatgacgttgcggtcagtggcgctattccgcgctatctctcctgtggctttatcctcgaagaaggattgccgatggagacactgaaagccgtagtgaccagcatggcagaaaccgcccgcgcggcaggcattgccatcgttactggcgatactaaagtggtgcagcgcggcgcggtagataaactgtttatcaacaccgctggcatgggcgcaattccggcgaatattcactggggcgcacagacgctaaccgcaggcgatgtattgctggtgagcggtacactcggcgaccacggggcgactatccttaacctgcgtgagcagctggggctggatggcgaactggtcagcgactgcgcggtgctgacgccgcttattcagacgctgcgtgacattcccggcgtgaaagcgctgcgtgatgccacccgtggtggtgtaaacgcggtggttcatgagttcgcggcagcctgcggttgtggtattgaacttagtgaagcggcactgcctgttaaacctgccgtgcgtggcgtttgcgaattgctgggactggacgccctgaactttgccaacgaaggcaaactagtaatagctgttgaacgcaacgcggcagagcaagtgctggcagcgttacattcccatccactggggaaagacgcggcgctgattggtgaagtggtggaacgtaaaggtgttcgtcttgccggtctgtatggcgtgaaacgaaccctcgatttaccacacgccgaaccgcttccgcgtatatgctaataaaattctaaatctcctatagttagtcaatgaccttttgcaccgctttgcggtgctttcctggaagaacaaaatgagttatacaccgatgagtgatctcggacaacaagggttgttcgacatcactcggacactattgcagcagcccgatctggccagcctgtgtgaggctcttagccaactggtaaagcgttctgcgctcgccgacaacgcggctattgtgttgtggcaagcgcagactcaacgtgcgtcttattacgcgagccgtgaaaaagacacccccattaaatatgaagacgaaactgttctggcacacggtccggtacgcagcattttgagccgccctgatacgctgcattgcagttacgaagaattttgtgaaacctggccgcagctggacgcaggtgggctatacccaaaatttggtcactattgcctgatgccactggcggcggaagggcatatttttggtggctgtgaatttattcgttatgacgatcgcccctggagcgaaaaagagttcaatcgtctgcaaacatttacgcagatcgtttctgtcgtcaccgaacaaatccagagccgcgtcgttaacaatgtcgactatgagttgttatgccgggaacgcgataacttccgcatcctggtcgccatcaccaacgcggtgctttcccgcctggatatggacgaactggtcagcgaagtcgccaaagaaatccattactatttcgacattgacgatatcagtatcgtcttacgcagccaccgtaaaaacaaactcaacatctactccactcactatcttgataaacagcatcccgcccacgaacagagcgaagtcgatgaagccggaaccctcaccgaacgcgtgttcaaaagtaaagagatgctgctgatcaatctccacgagcgggacgatttagccccctatgaacgcatgttgttcgacacctggggcaaccagattcaaaccttgtgcctgttaccgctgatgtctggcgacaccatgctgggcgtgctgaaactggcgcaatgcgaagagaaagtgtttaccactaccaatctgaatttactgcgccagattgccgaacgtgtggcaatcgctgtcgataacgccctcgcctatcaggaaatccatcgtctgaaagaacggctggttgatgaaaacctcgccctgaccgagcagctcaacaatgttgatagtgaatttggcgagattattggccgcagcgaagccatgtacagcgtgcttaaacaagttgaaatggtggcgcaaagtgacagtaccgtgctgatcctcggtgaaactggcacgggtaaagagctgattgcccgtgcgatccataatctcagtgggcgtaataatcgccgcatggtcaaaatgaactgcgcggcgatgcctgccggattgctggaaagcgatctgtttggtcatgagcgtggggcttttaccggtgccagcgcccagcgtatcggtcgttttgaactggcggataaaagctccctgttcctcgacgaagtgggcgatatgccactggagttacagccgaagttgctgcgtgtattgcaggaacaggagtttgaacgtctcggcagcaacaaaatcattcagacggacgtgcgtctaatcgccgcgactaaccgcgatctgaaaaaaatggtcgccgaccgtgagttccgtagcgatctctattaccgcctgaacgtattcccgattcacctgccgccactacgcgagcgtccggaagatattccgctgctggcgaaagcctttaccttcaaaattgcccgtcgtctggggcgcaatatcgacagcattcctgccgagacgctgcgcaccttgagcaacatggagtggccgggtaacgtacgcgaactggaaaacgtcattgagcgcgcggtattgctaacacgcggtaacgtgctgcagctgagtttgccagatattgttttaccggaacctgaaacgccgcctgccgcaacggttgtcgccctggagggcgaagatgaatatcagttgattgtgcgcgtgctgaaagaaaccaacggcgtggttgccgggcctaaaggcgctgcgcaacgtctggggctgaaacgcacgaccctgctgagtcggatgaagcggctgggaattgataaaagcgcattgatttaactgcaaattgccggacagatctgcctgtccggcatattattcatgaggttttttcggacgatatttttccggcagttctggcaccggacgcttgtcatcgatgagatgacgcacggttaagatcggatgacgccacagcattctcggcccggcccaacgcataatctgtttcatctcttcacgctttgcaggctggtaacagtgcaccggacactgcttacaggctggtttctcttcgccgaacacacatttatccagccgcttttgcgcgtaaacaaacaacgcctcgtaatgctccggctccgcactcgcctgcgggcatttcgcttgataaagatcgatcatttttttaatcgtcagtttttcacgagagatacgcttgccggacatgctgcctccacctcattaagatgtatttatattacatcttaatcttaaagggcactatgactccaaagaagaagggttagccaaccgatacaattttgcgtacttgcttcataagcatcacgcaaaagctgcaaaacagcatctttcccggaaccagcatcaagaactcgccgttcgcttcttcccctgaaatgattaactccggtatcatgtgcgccttatgtgattacaacgaaaataaaaaccatcacaccccatttaatatcagggaaccggacataaccccatgagtgcaatagaaaatttcgacgcccatacgcccatgatgcagcagtatctcaggctgaaagcccagcatcccgagatcctgctgttttaccggatgggtgatttttatgaactgttttatgacgacgcaaaacgcgcgagccaactgctggatattagtctgaccaaacgcggtgctagcgcgggagagccgatcccgatggcggggattccctaccatgcggtggaaaactatctcgccaaactggtgaatcagggagagtccgttgccatctgcgaacaaattggcgatccggcgaccagcaaaggtccggttgagcgcaaagttgtgcgtatcgttacgccaggcaccatcagcgatgaagccctgttgcaggagcgtcaggacaacctgctggcggctatctggcaggacagcaaaggtttcggctacgcgacgctggatatcagttccgggcgttttcgcctgagcgaaccggctgaccgcgaaacgatggcggcagaactgcaacgcactaatcctgcggaactgctgtatgcagaagattttgctgaaatgagcttaattgaaggccgtcgcggcctgcgccgtcgcccgctgtgggagtttgaaatcgacaccgcgcgccagcagttgaatctgcaatttgggacccgcgatctggtcggttttggcgtcgagaacgcgccgcgcggactttgtgctgccggttgtctgttgcagtatgcgaaagatacccaacgtacgactctgccgcatattcgttccatcaccatggaacgtgagcaggacagcatcattatggatgccgcgacgcgtcgtaatctggaaatcacccagaacctggcgggtggtgcggaaaatacgctggcttctgtgctcgactgcaccgtcacgccgatgggcagccgtatgctgaaacgctggctgcatatgccagtgcgcgatacccgcgtgttgcttgagcgccagcaaactattggcgcattgcaggatttcaccgccgggctacagccggtactgcgtcaggtcggcgacctggaacgtattctggcacgtctggctttacgaactgctcgcccacgcgatctggcccgtatgcgccacgctttccagcaactgccggagctgcgtgcgcagttagaaactgtcgatagtgcaccggtacaggcgctacgtgagaagatgggcgagtttgccgagctgcgcgatctgctggagcgagcaatcatcgacacaccgccggtgctggtacgcgacggtggtgttatcgcaagcggctataacgaagagctggatgagtggcgcgcgctggctgacggcgcgaccgattatctggagcgtctggaagtccgcgagcgtgaacgtaccggcctggacacgctgaaagttggctttaatgcggtgcacggctactacattcaaatcagccgtgggcaaagccatctggcacccatcaactacatgcgtcgccagacgctgaaaaacgccgagcgctacatcattccagagctaaaagagtacgaagataaagttctcaccagtaaaggcaaagcactggcactggaaaaacagctttatgaagagctgttcgacctgctgttgccgcatctggaagcgttgcaacagagcgcgagcgcgctggcggaactcgacgtgctggttaacctggcggaacgggcctataccctgaactacacctgcccgaccttcattgataaaccgggcattcgcattaccgaaggtcgccatccggtagttgaacaagtactgaatgagccatttatcgccaacccgctgaatctgagcccgcagcgccgcatgttgatcatcaccggtccgaacatgggcggtaaaagtacctatatgcgccagaccgcactgattgcgctgatggcctacatcggcagctatgtaccggcacaaaaagtcgagattggacctatcgatcgcatctttacccgcgtaggcgcggcagatgacctggcgtccgggcgcagtacctttatggtggagatgactgaaaccgccaatattttacataacgccaccgaatacagtctggtgttaatggatgagatcgggcgtggaacgtccacctacgatggtctgagcctggcgtgggcgtgcgaggaaaatctggcgaataagattaaggcattgacgttatttgctacccactatttcgagctgacccagttaccggagaaaatggaaggcgtcgctaacgtgcatctcgatgcactggagcacggcgacaccattgcctttatgcacagcgtgcaggatggcgcggcgagcaaaagctacggcctggcggttgcagctctggcaggcgtgccaaaagaggttattaagcgcgcacggcaaaagctgcgtgagctggaaagcattagcccgaacgccgccgctacgcaagtggatggtacgcaaatgtctttgctgagtgtaccagaagaaactagccctgcggtcgaagctctggaaaatcttgatccggatagtctcaccccgcgtcaggcgctggagtggatttatcgcttgaagagcctggtgtaataacaattcccgatagtcttttgctatcgggaatattaacgacaactgacgaataaaataaaaacaccctgtataataggaaagcttattttacagggtaaaaccatgccatctacacgctatcaaaaaatcaatgcccatcactatcgccatatatgggtcgttggtgatattcatggtgaatatcagttattacaatcccgcttacatcaactctcttttttccccaaaatcgacttacttatttctgtcggcgataatattgatcgtggaccggagagtcttgacgtcctgcgcctgctaaaccaaccctggtttacgagcgttaaaggcaaccacgaagcgatggcgcttgaggcattcgaaactggcgatggcaatatgtggcttgccagcggtggtgactggtttttcgatttaaatgatagtgagcaacaagaggcaatagatctgttgctgaaattccatcaccttccacatattattgaaatcactaacgacaacataaaatatgccatcgcacatgcagattatccggggagtgaatatctctttggtaaagaaatagcggagagcgaattactctggcctgttgatcgtgtgcagaaaagccttaatggcgagttacaacaaataaacggcgctgattattttatatttggacatatgatgtttgataacattcagacgttcgctaaccagatttatattgataccggaagcccgaacagcgggcggctgagtttttataaaataaagtaatctcatgcttcttctgtgaagcatgagtaacccggtgttattgcaggccattattcatttttcgctaccagcaaagagagatcctgcttcaccagcgcgcgactggcactctccggcaaaccgtcgtctgtaataatctgatcaaactcgcttaatggtaacgccagccatgtcgccacctgaccatatttcgtcgcatcacagaccaaaactcgctggcggctggcactggcaatcgcccgtttcaccgtgactttatcttccgctggcgtagaaatcccccgcacactccaactgcttgcagaaataaaagcctgatcaatcatcaggctgcgcagcatggtcgcagcggcttccccgacacaggaacggttttcccgacacactgcaccgccagtgtgaataattgtgcaattactgttgtcgagcaagtagtccgcaataacgaaatcgtttgtgaccacagtcagactctccatgtgaatcagatgctgtgctatcgctaacgtggtcgttcccgcatccagatagatacaacttcccggctgaacaagacttgccgccagcttgccaatagccgctttttgcgtcattgccagcgcagtttttacctgatgagaaggttcatgcgccacgcgtcccggagactggacgcctccggacaccagcacaacggctccctgctgctccagtttttgtaaatcccgacgaatggtcatatgactcacattcattctgtccgttagttcagcaatactgacaatgcctttttcagctaccatctcaaggatgatttggcgacgctctacgggtatcaacttttgctccttcctttgtcctgcactcattctacgctatttgcctgcgaaacgtgcgcggcgcaactaacgcttagttcacataaaataacacacaatgttaatttatgtgaatcagatcaccataccgttatcttccagcgcttatattcacaatatcaaacaaaatatcacttaaattaacaaggagagcagatgaaaacgggatctgagtttcatgtcggtatcgttggcttagggagtatgggaatgggagcagcactgagttatgtccgcgcaggtctttctacctggggcgcagacctgaacagcaatgcctgcgctacgttgaaagaggcaggtgcttgcggggtttctgataacgccgcgacgtttgccgaaaaactggacgcactgctggtgctggtggtcaatgcggcccaggttaaacaggtgctgtttggtgaaacaggcgttgcacaacatctgaaacccggtacggcagtaatggtttcttccactatcgctagtgctgatgcgcaagaaattgctaccgctctggctggattcgatctggaaatgctggatgcgccagtttctggtggtgcagtaaaagccgctaacggtgaaatgactgtcatggcctccggtagcgatattgcctttgaacgactggcacccgtgctggaagccgttgccggaaaagtttatcgcataggtgcagaaccgggactaggtagcaccgtaaaaattattcaccagttgttagcgggcgtacatattgctgccggagccgaagcgatggcacttgcagcccgtgcggggatcccgctggatgtgatgtatgacgtcgtgaccaatgccgccggaaattcctggatgttcgaaaaccggatgcgtcatgtggtggatggcgattacaccccgcatagtgccgtcgatatttttgttaaggatcttggtctggttgccgatacagccaaagccctgcacttcccgctgccattggccagtacagcattgaatatgttcaccagcgccagtaacgcgggttacgggaaagaagacgatagcgcagttatcaagattttctctggcatcactctaccgggagcgaaaagttgagctaaactctaccgggagcgaaatcatgatcaagattggcgttatcgccgatgattttaccggcgcgacggatatcgccagttttctggtggaaaacggtctaccaacggtacaaattaacggtgttccaacaggtaaaatgccggaagcaatcgacgcactggtgatcagcctgaaaacgcgctcctgtccagtggttgaagccacacagcaaagcctggcggctctgagctggttgcaacagcaaggttgcaaacagatctatttcaaatactgctctactttcgacagtacggcgaaaggtaatattggcccggttaccgatgccttaatggatgctctcgacacgccgtttacggtcttctctccggccctgccggtcaacggacgtacggtttatcaggggtatttgttcgtaatgaatcaactgctggccgaatccgggatgcgccatcacccggtaaatcccatgaccgacagctatcttccccgtctggttgaagcgcaatccacagggcgctgcggcgtcgttagcgcacatgttttcgaacaaggtgtggatgccgttcgtcaagagctggctcgcttacagcaagagggctaccgctacgcggtgcttgatgcgctgaccgaacaccatctggaaattcagggagaagccttgcgcgatgccccactggtaacgggcggttctggtctggcgattggcctggcccggcagtgggcgcaagaaaacggtaaccaggctcgcaaagcagggcgtccgctcgctgggcgcggcgtagtgctctccggtagttgctctcaaatgaccaaccgccaggtagcacattaccgtcaaattgcaccagcccgtgaagttgatgtggcacgctgcctcagtattgaaactctggccgcttatgcacacgaactggcagagtgggttctgggccaggaaagtgtacttgctccactggtttttgccaccgccagcactgacgcattggcagcaattcaacagcaatacggtgcacaaaaagccagtcaggcagtagaaacactgttttctcaactagcggcgcggttagcagcggaaggcgtgacacgctttattgtcgcaggcggtgagacctccggcgtagtcacacagagcctgggaataaaagggtttcatattggcccaaccatttccccggcgtgccgtgggtaaacgcactggataagcctgtctcactcgcccttaaatctggcaacttcggtgatgacgcctttttttcacgagcccaaagagagtttttatcatgagcgatttcgcaaaagtagagcagtctttgcgagaggagatgacgcggattgccagtagtttctttcagcgcggctatgcaaccggtagcgctggcaatctgagcctgcttttacctgacgggaatttactggcgacaccgacaggtagttgcctgggcaatctcgatccgcagcggctttccaaagtcgccgcggatggcgaatggttaagtggtgacaaacccagcaaagaggtgctctttcatctggcgctgtatcgcaacaatccgcgctgtaaagcggtggtgcatttgcacagcacatggagcacggcgctttcctgcctgcaagggctggacagcagcaacgttattcgtccgttcacaccatacgtggtgatgcggatgggaaatgtcccgctggtgccttattaccgaccgggcgataaacgcatcgcacaggatctggcggaactggcagcagacaatcaggcttttttactggcaaatcatggcccagtggtttgcggtgaaagcctgcaagaagccgccaacaatatggaagagctggaggaaacggcaaagctgatttttattctcggtgaccgcccgatccgttatctgaccgcaggtgaaattgcggaattaaggagttaatgcaatgcctcgttttgcagctaatttatccatgatgttcaccgaagtgccttttattgaacgcttcgccgcagcgcgaaaagccgggttcgatgctgtggaatttctgtttccctataactactccaccctgcaaatccaaaagcaactggagcaaaaccatctgacactggcgctgttcaataccgctcccggagatattaatgcgggggaatggggattatccgcccttcccggacgtgagcacgaagcacacgcagacatcgacctggcactggaatatgcattggcgctcaattgtgaacaagtccatgtgatggcaggcgtcgtgcccgctggcgaagatgctgaacggtaccgggcagtatttatcgataatatccgctacgctgccgaccgctttgcgccacacggcaagcgaatattagttgaagcactcagccccggcgttaagcctcattatctcttctccagccagtatcaggcactggctattgttgaagaggttgcgcgagataacgtgtttattcaactagatacttttcatgcgcaaaaagtagatggcaacctgacgcatttaatccgcgactacgccgggaaatatgcgcacgtacaaattgccggactacctgatcgacatgaaccggacgatggagaaatcaactatccgtggctgttccgcctgttcgatgaggtgggatatcagggctggatcggttgtgaatataaacctcgtggcctcaccgaagaagggcttggctggtttgacgcctggcgctaattcgttaaatccctaattacaacgtacccatacatccccccatctacggatggggtaggttaactataactttcagacagggtttcccatgtccacaattacattgttatgcattgcgttagctggcgtaatcatgctgttgctgctggtcatcaaggcaaaggtacaaccattcgttgctttgctcctcgtcagcctgttagtcgcacttgcggcaggtataccggcgggcgaagtgggtaaagtgatgatcgccgggatgggcggtgtgcttggttccgtcactattattattggtctgggcgctatgctggggcgtatgatcgaacactctggtggtgcagagagtctggctaattatttcagtcgcaagttaggtgacaaacgaactatcgctgcgctgactctggcagcgttcttcctcggtattcccgtcttctttgatgtcggctttattattcttgcgccaatcatttacggttttgccaaggttgccaaaataagcccactcaaatttggcctgcctgtcgctgggatcatgctcactgttcacgtggcggtaccgccgcatccaggccctgtcgccgcagcggggttactccacgcagacatcggctggctaaccatcatcggtattgcgatttctattcccgtaggggttgttggctactttgcagcgaaaataatcaataagcgccaatatgcgatgagtgtagaagtactggaacagatgcaactggctccggccagtgaggaaggcgcgacaaaattaagcgataaaataaatccaccgggcgtcgcgctggtcaccagcctaattgttattcctatcgcgattatcatggcgggtacggtttccgcaacactgatgccgcctagccatcccctgcttggtacgctacagctgatcggcagtccaatggtagctctaatgattgcgctggtgctggcattctggttattggctttacgtcgcggctggagcttacaacacaccagcgacattatgggcagtgcgcttcctactgcggcggtagtgattttggttactggtgctggaggggtatttggcaaagtgctggtggaaagcggcgtcggcaaagcccttgccaacatgctacaaatgattgacctgcctctgttaccagccgcatttattattagtctggcgctgcgtgcaagccaggggagtgcaaccgtagcaatactgacaaccggcgggttactcagtgaagcggtgatgggattgaatccgattcagtgcgtattggtgacgctggcagcctgctttggtgggcttggtgcgagtcatattaatgacagtgggttctggattgtgaccaaatatctggggttgagcgtagcagacggtctgaaaacctggacagtgttaacgaccattctcggttttaccggattcttaattacctggtgcgtatgggcggtaatttgaccttaataaaaaggtccgatgggcatcggaccttttattgtgcacagaaaaggccagcctcgcttgagactggcctttctgacagatgcttacttactcgcggaacagcgcttcgatattcagcccctgcgtttgcaggatttcgcgcaaacggcgcaggccttcaacctgaatctggcgaacacgttcacgggtgaggccaatttcacgacctacatcttccagtgttgccgcttcgtaccccagcaaaccgaatcgacgtgccagcacttcacgctgtttggcgttcagctcgaacagccatttgacgatgctctgcttcatatcgtcatcttgcgtggtatcttccggaccgttctctttttcatcggccaggatgtccagcaacgctttttcggaatcaccacccagcggggtgtctacgctggtaatgcgctcgttaagacgaagcatacggctgacgtcatcaactggcttatccagttgctctgcgatctcttccgcacttggttcatggtccagcttatgggacaactcacgtgcggttcgcaggtaaacgttcagctcctttacgatgtgaatcggcaaacgaatagtacgggtttggttcataatcgcccgttcaatcgtctggcgaatccaccaggttgcgtatgtactgaagcggaaaccacgttccgggtcaaacttctctaccgcgcggatcagccccaggttgccctcttcgataaggtccagcaacgccagaccacgattgccataacggcgggcaatttttaccaccagacgcaagttactctcgatcatccggcggcgagaggcgacatctccacgcagtgcgcgacgcgcaaaataaacttcttcttcggccgttaacagtggactataaccaatctcaccaaggtaaagctgagtcgcgtccaacacacgctgtgtggctccctggcttaacagttcctcttcggccaaatcgttatcactgggttcctgttctactaaggccttttcgtcaaaaacctcaactccgttctcatcaaattccgcatcttcatttaaatcatgaactttcagcgtattctgactcataaggtggctcctacccgtgatcccttgacggaacattcaagcaaaagcctggttccgccgatttatcgctgcggcaaataacgcagcgggtttacggatttccccttgtaacgaatttcaaaatgcaagcgtgtactactggttccggtgctacccatggtcgctattttttgccccgccttaacttcttgttgttcccggaccagcattgtgtcgttatgggcgtaggcactcaggtaatcatcattatgtttgatgataatcagattaccgtagccgcgcagcgcgttaccagcataaacaacgcggccatctgcggtcgcgataattgcctgtcctttgctgcctgcgatatcaatccccttgttgcccccctcagaagcgccaaaggtttcgatcactttgccctcagtcggccagcgccaggtggagataggcgtactggtacttgtactgctgacagtcggctcggttgtgcttgctgttggtaccgttacaggcgctgtgaccgtggtcgcagttggcttgttgttcggcaacattttgttagcactctgttcaccgctagactcagaatacgtaattgtcggttggctcgcaacagcaacggtggaattttgtgcaggcttgatcacaactccttgctctgctgcgtcggcctgggtaatggcatttccgccagtgattggcgtaccggaagcattacccacctgcaaggtctgaccaacgttcagcgcgtatggtgcctgaatattgttgcgctgagcaaggtcacggaaatcgttgccagtaatccaggcgatatagaaaagtgtgtcgccttttttcacggtataggtactgccgctataactgcctttcggaatgttcccatactgacggttatagacgatgcgtccgttttccatctgtaccggctgctgagctactggctgcactggctggatttgcggttgttgagtagcctgaatttgtggctgctgcaccggctgaatttgcggttgctgcgctgtagacgtcgtccccattttcggcggcggcgtaatcaacataccagaattagtatttgcaggcgcattgccattaacggagctgaccggtgccggtggattactagtgtcagaacagcctgccagccataggctaaccagactcaaagccgcaatgcggcgaacggtgaattttgggcttcccgcgctcatttatcccccaggaaaaattggttaataaccagtgacataattaccgtgcaaggcaccctactgaacactggaaaagatgttcacgatacgctgacctgcggcaaaataaccaggaaaaatccaggtatttcctcacgttttaagccagctcacccttcactaaagggacaaagcgcacggcctccacggtatcgataataaattcgcctccccgacgacgcacccgtttcaaatactggtgctcctcccctacgggtaagacgagaatcccgccttcgtccagctgcgtcattagcgcagttggaatttccggcggtgccgccgtaacaatgatagcgtcaaacggcgcacgtgcctgccaaccttgccatccatcgccatgacgggtactaacattatgtaaatcaagatttttcaggcggcgacgtgcctgccactgcaagcctttaatccgttcaacgctgcaaacatgctggacaagatgcgccaggattgccgtttgatatccgctaccggtgccaatttccagcacccggctctgcggcgtcagctcgagtaattcggtcattcgcgccaccatatatggctggctaattgtctgcccctgacctatcggcaaagcgatattgtcccaggctttttgttcaaacgcttcatcaacgaatttttcacgcggcacggcggcaagtgcattcagcacctgctcatcctgaataccttgcgcacgtaattgatccagaagtgcttgtacgcgtctgcttaccattgcgtgccaactcccacgctgtttaaccagtcactaaccacatcttgcgcgctatgcgcagttaaatccacatgcagcggcgtgatggagacatagccctcatctaccgcagcaaaatcggtccccggaccagcatcacatttaccgcccggcgggccaatccagtacagcgtattgccgcgcggatcttgctgcgggatcacctgatctgccggatgtcgtgtaccgcagcgcgtcacgcgaatacctttgatttgatccaagggtaaatccggaacgttaatattaagaatacgcccggtgcgcagcggctctttacacagtgcgcgcaaaatactacaggttaccgccgcggcagtgtcgtaatgtttatgcccgtcaaggctgacggcaagcgccggaaaacctaaatgacggccttccatcgcggcggctaccgtaccggaataaataacatcatcccccagattcggcccggcgttaattccggacacaacaatgtccgggcgcggacgcatcagagcattcacgccaagatagacgcaatcggtcggggttcccatttgcacagcaatatcaccattttcaaaggtaaacgtgcgcagggaggattccagtgtcagagaattactagcgccgctgcggttacgatcgggggcgaccacctgaacgtcagcaaactcacgcaaggctttcgccagcgtttgtataccgggtgcatgtaccccgtcatcattactcagcaatatgcgcataatcacctgttgtgttgataagttccctgacaacgctggttgcaaaactacccgccggaagccagaaacggatctctacggtgacgtcatcccaccaattccagcttaattgttgcggatacagcagcatcgctctgcgcgcggcttcaactttttcgcgcaccagtaaagcttgtaattcagtttctgcggcgacagctgcttgttcgaatgccagcgcttcacgctgagttccccattcgccactgcctggcaatgcggcggttatcatcaactctttatcgttgacgcgacgctgtaattccgccagttcttcggtggttgcgacaaaccagctaccacgtccggctaattgtagcgcatcgccgtcaacaacttgattaacgtctgcttttttgaggcgctcagcaacaatctgattaaacaacgcactgcgggctgcgctcaaccaaaaactccgtttattgcgatcgcgcaccggagtattggtttgcgcccagcgctgcgccccctgcaagttgctaccgccaatcccaaaacgttgggcaccgaagtagttcggtacaccttttacgcaaatatcgatcagacgttgttcaacgtcatcgcgattgctcacttcgcgcagaaccagggtaaaggcgttacctttcagcgcgcctaaacgcagcttgcgcttgtgccgcgcatactccagcacctggcagccttccagttgaaaggcgctcagatcgggcatttccttgcccggcacgcgagcgcataaccactgttccgtaacagcatgtttgtctttttgcccagcgaagctgacttcacgggcatgaattttcaggaatttcgccagtgcatccgccacaaaacgggtattgcagccgtttttgaggattctaaccagaatatgctcaccttcaccatcaggctcaaagcccaaatcttccaccaccacaaagtcttccggattggctttcagcagcccggtgccttgcggtttaccgtggaggtaagtgagattatcaaactcaatcattttgttgccttaatgagtagcgccaccgcttcacaggcaatcccttccccacgtccggtaaatcccagtttttccgtagtagtggctttcacgttaacatcatccatatggcagccgagatcttcggcaataaacacgcgcatttgtggaatgtgcggcaacatcttcggtgcctgagcgatgatagtgacatcgacgttgccaagggtataacccttcgcctgaatacgacgccaggcttcgcgtagcagctcgcggctatcggcacctttaaatgccggatcggtatccgggaacagcttgccgatatcccccagcgccgccgcgccaagcaatgcatcggtcaacgcatggagcgccacgtcgccatcagaatgcgccagcaatcctttttcgtaaggaatgcgtacgccaccaatgataattgggccttcaccgccaaaggcatgtacgtcaaaaccgtgtccaattcgcattatgtattctcctgatggatggttcgggtgaggtaaaactcggccagtgccaaatcttccgggcgcgtgactttaatgttatccgcacggccttcgaccaactgaggatggaatccgcaatattccagcgcgctggcttcgtcggtaatagtcgcgccttcatttagagcgcgcgtcagacagtcatgtaacagctcacgagggaaaaattgcggcgtcagcgcgtgccataagccgttgcgatcaacggtatgagcaatggcatttttgcccggttcggcacgtttcatagtatcgcgcactggtgcggcgaggatcccccccgtgcggctggtttcgctcaacgccaacaatcgcgcgaggtcatcctgatgcaaacaaggacgagcggcgtcatgcaccaatacccactgcgcgtcgccagcggctttcagacctgccagcacggaatcggcacgctcatcaccgccatctacaacggtgatttgcggatgattcgccagaggaagttgtgcaaaacggctatcgccaggacttatggcaatgacgacacgtttcacccggggatgcgccagcagcgcatgcacgctgtgttcaagaatggtttgattaccgatactgagatattgcttaggacattccgtttgcattcgacggccaaatccggccgccggaaccacggcgcaaacatccaaatgagtggttgccatgttaattcccgggctgatttatcgattgttttgccccgcagactgtgcgcgcttgctcgcgtcaggcaccagacgataaaaagtttcgcccggcctggtcatgctgagttcattacgcgcacgctcttcgagcgcctcctggccgccattgagatcgtcaatttcggcaaaaagttgatcgtttcgcgctttaagtttcgcgtttgtagcttgctgtgccgccacatcatcattgacgcgggtatagtcatgtataccgttcttaccgaaccacaggctatactgtagccagaccagaatagccagcaacagcagcgttagtttacccatcctgccccctgaaaaacggcatcatcatcccatgcatccgaagacgactctacatcctctgttggggataccgcgacaacgcgggcaaatgtaccacatttgtccattgttacgtatacccagggcgtgcagaacataatctcattattagttacggtttgaattatgaacagaggagacgggaaagtacaaattagcccagtagccacataaacagtgcgccaaacataatgcctactgtcaccagggtgaaaacaatactgtagcgtagctttccgtccatcaaactatgcagcgcaatccccaccactaccgcgacgggcatcagcgccagaaagaaaggccaggtgtagataaagaagaacagcgtgttagagccataaatcaacatcggcatcgccagcgcaaataaccaggagataaaaccgaccacggcaccaggcagactccatgtggtttcttcatcctcagtaaggctgtcgttatttgttagtgtaatgttatggctattacgcatatttgatcctgttactttgacgaaccgggcatggaaacccggtggtgtctcaggatctgataatatcgttctgtctcaacagatctaataattgctgtaccaaatttgttactaattgttcaccattgagatgaatttctgcgctttcaggcgcttcgtaaacggaatctattcccgtaaagttgcgcagttcaccggcacgcgctttcttatataagcctttgggatcgcgggcttcgcaaatcgccagcggcgtatcgacaaacacttcgataaagcgcccttctcctacgcgttcgcgaaccatctggcgttcggcgcggtgtgggctgataaatgcggtcagcaccaccagtccggcttcaaccatcaaattcgccacttcaccgacgcgacggatattctctttacgatcggcatcgctaaaaccgagatcgctgcataatccgtggcgaacattgtcgccatccagcagatacgtactgacgccgagtttatgtaacgcctcctccagcgccccggcgaccgtacttttaccggacccggagaggccggtaaaccacagcactacaccacgatgaccgtggtgtagctcgcgttgttgcacagtgaccggatggctatgccagacgacgttttcgtcatgcagcgccattatttatcccccagcaaatcgcgcgcgccccagtgcggaaagtggcgacgaaccagagcattcaattccagttcgaatgcactgaattcagatggcgcagcagttgcctggctaactggctcgtgcaccataccggcacccacggtcacattgctcaggcgatcgataaaaatcagcccacccgtcaccggattttgttgataacgatctaacaccagcggctcgtcaaaagtgagatccacgaggccgatcccattcagtggcaggttttcaacttcacgctgggtaaggttattaatatcaacctgatagcgaatgccatcaacacgcgcgcgcgtcttcttaccggcaattttgatgtcgtaactctgccctggagaaagcggctgttccgccatccataccacatccacgctcgcgctctgcaccgccggtaacgcttcgtctgccgccagcagcagatcgccacggctgatgtcgatctcatccgtcagcaccagggtgatcgcttctccggcaaaggcttcttcgcgatcaccatcaaaagtcacgatccgcgcgacgttactttccacaccagagggcagcactttgacacgttgcccgacttccacgcgaccggatgccagcgttccggcgtaaccacgaaaatcgagattcgggcgattaacgtactgcaccgggaagcgcattggctgagcatccaccactcgctggatctccacggtttccagcacttcgagcagtgtcggaccgctgtaccacggcatactttcactttggcttgccacgttgtcgccttccagtgcagagagcggcacaaagcggatatccagattacccggcagctgcccggcaaaggtcaaataatcttcacgaatacgggtgaacgtctcttcactgtaatccaccagatccattttgttgatcgccacgaccagatgtttgatccccaacagtgtggagataaaactgtgacgacgggtttgatcgagcacgcctttacgggcatcgatcagtaagatcgccagttcacatgtgcttgcgccagtcgccatattgcgggtgtactgctcgtgccctggggtgtcggcgataataaatttacgcttctcggtagagaaatagcggtaggccacgtcaatggtgatgccctgttcgcgctcagcttgcaggccgtccaccagcagagccagatccagcttttcgccctgggtgccgtgacgcttactgtcgttatgcaggctactgagctgatcttcgtagatttggcgggtatcgtgcagcagacgaccaatcagagtacttttgccgtcatcgacgctaccacaggtcagaaaacgcagcaggcttttatgttgttgcgcaatcatccaggcttcgacgccgccttcattggcgatttgttgtgcaagtgcggtgttcatcttaaaaatacccctgacgttttttcagctccatagaccccgcctggtcgcggtcaatcacgcggccctgacgttcactggtggtggaaaccagcatctcttcgatgatttccggcagtgtttgtgcattactctccaccgcaccggtcagcggccagcagcccagcgtacggaaacgcaccatccgttttttaatcacttcgcccggttgcaggtcgatacggttgtcatcaatcatcatcaacataccgtcgcgttccagaaccggacgttccgcagcgagatatagcggaacaatgtcgatattttccagccagatgtattgccagatatcctgctcggtccagttagagagcgggaagacgcggatgctttcgcctttgttaatttgcccgttgtagttgtgccacagctccgggcgctgatttttcggatcccagcgatggaagcggtcacggaaagagtaaattcgctctttagcgcgggatttctcttcgtcacggcgcgcaccaccgaaggcggcatcaaaaccgtatttgttcagcgcctgtttcaggccttcagttttcataatatcggtatgtttcgcgctgccgtgcacgaatggattaatccccatcgccacgccttccgggtttttatgcaccagcagttcgcagccgtaggctttagcagtacgatcgcggaactcatacatctcgcggaatttccagccggtatcgacatgcagcaacgggaaaggcagcgtacctggataaaacgccttgcgcgccagatgcagcatgacgctggaatctttaccgatagagtagagcatcaccggattactgaattctgccgccacctcgcgaataatgtggatgctttccgcctccagttgccgcaggtgagtaagtcgtatttgatccataaccgttcctttgcaataccgctattttcttgccatcagatgtttcgactatagggagcgtaagagaacgaatgaaattaccaattagaatgagtagttccttaacggaataacgatttggcaaagctaatatcaaaaagtgcttaaggcaccggatttcgggcgtttaggaagatttgaaattgttttagcgcagcggcagtttcatactatggcggtaaaaaaatttgcatggtatttaaggactcactatgttttccgcattgcgccaccgtaccgctgccctggcgctcggcgtatgctttattctccccgtacacgccagcagtcctaaacctggcgattttgctaatactcaggcacgacatattgctactttctttccgggacgcatgaccggaactcctgcagaaatgttatctgccgattatattcgccaacagtttcagcaaatgggttatcgcagtgatattcggacatttaatagtcggtatatttataccgcccgcgataatcgtaagagctggcataacgtgacgggaagtacggtgattgccgctcatgaaggcaaagcgccgcagcagatcatcattatggcgcatctggatacttacgccccgctgagcgatgctgacgccgatgccaatctcggcgggctgacgttacaaggaatggatgataacgccgcaggtttaggtgtcatgctggaattggcagaacgcctgaaaaatacgcctaccgagtatggtattcgatttgtggcgaccagcggcgaagaggaagggaaattaggcgctgagaatttactcaagcggatgagtgacaccgaaaagaaaaatacgctgctggtgattaatctcgataacttaattgttggcgataaattgtatttcaacagcggtgtaaaaacccctgaggcagtaaggaaattaacgcgcgacagggcgctggcaattgcgcgcagtcacggaatagccgcaacgaccaatccgggtttgaataaaaattatccgaaaggcactgggtgttgtaatgacgcagaaatattcgacaaagcgggcattgctgtacttagcgtggaagcgactaactggaatcttgggaataaggatggttatcagcaacgcgcaaaaacacctgccttcccggcgggaaatagctggcatgacgtaagactggataatcaccaacatattgataaggctcttcctggaagaatagaacgtcgctgccgtgacgttatgcggataatgctacctctggtgaaggagttggcgaaggcgtcttgatgggtttgaaaatgggagctgggagttctaccgcagaggcgggggaactccaagtgatatccatcatcgcatccagtgcgcccggtttatccccgctgatgcggggaacaccagcgtcaggcgtgaaatctcaccgtcgttgccggtttatccctgctggcgcggggaactctcggttcaggcgttgcaaacctggctaccgggcggtttatccccgctaacgcggggaactcgtagtccatcattccacctatgtctgaactcccggtttatccccgctggcgcggggaactcccgggggataatgtttacggtcatgcgccccccggtttatccccgctggcgcggggaactctgcgtgagcgtatcgccgcgcgtctgcgaaagcggtttatccccgctggcgcggggaactctctaaaagtatacatttgttcttaaagcattttttcccataaaaacaacccaccaaccttaatgtaacatttccttattattaaagatcagctaattctttgttttcaaacaggtaaaaaagacaccaaccttaaaccatccaaatctaccggggtacgcctgtttaacccaaatgtctggaactcaaatcccgtttccgtattcgttgcccatgccatcactacattgccttcttccgccagtccagctatttgttcccagatcatttcacgaatttttgcggatacatcacctacatatacccctgcacgtacctccaacaaccagatggctaatctgcctcgtaagcgcggaggtacattttcagtgaccacgaccaacatactcatttcagctactccgatggcctgcatctcccagactaacaggaagcggaatggcaacaggctgtgcatcttcaggtggggccggcggttgtatttctccagcggcaagcacgtcctctataagcggaatcaatttggctaatgttttactactgcgaaaaatatccctgcacgccaaacggacttcccggtccggctcaccagggttacgacgcgctatctcaaaagctttcggtacaacagtgtcaaatttaatgatgtctgcaatatcgtaaacaaaggaaagaggctttcctgtatgcacaaacccaatagctggtgcataaccagctgcaagtatcgccgcttcagttacgccgtataaacaggaagttgcagcgctaatgcattggttgatcgtatcgcccttttcccagtctttcggatcgtagcgacgtccattccatgtcacgccgtattgcttcgccagaagtgcgtaggttgcccgcacgcgactgccttctatacctctgagttgctctacggagcgccgggcaggcgcaggttctccaaaccgaagttcaaacattttacgtacgaccttcagacgcaaatcttcatccagagcaagttttgcctgatagagcagcttatcactacgcgcacctccaggctgaccagaagcataaacacgaacgcccgcttcccccacccataccaacaatgttccaacttgcgcagccaggcgtacagctgcatggctaacccgtgtaccaggttccagcatgatgcaggcaacgctgccaacaggaatatgagtgcggatccctgtcttgtcgataagtacaaacgcgccatctattacatcgatctgcccatattgcagaaagatcatggagacgcgatctttgagtggaatgggattaaggggaagccaggtcattttattacacctcaatcacagtggagccaaagatagcaagccacatcccatgcttttagctggcccaataccttgctgtacaagatctattaacgctggcgcgtcgttgatggtgagcacaccttcaaagcaaaccgtttggatctttccacttttaccatcaccagaaaaatactgtggccgttcgcttatgggatgcacatcttcaacgcgcgccgcattgcccaatttacgttgcaaccacgcgatttgttctgcttcttttattaacggaacccgacagcgtttaatattccctttactgtccaggcgcttttgattgtcgagaatagttttgatcggatttgcccgaagccgaaaatagagtggaacaccaacctgaagttgaaattcaacctgtttagttttaatgactgtcgcaacggcagtactaacaggcatttgcgcactctgcaataaaacatgacagccttctggtgtgtttcgcttctcaacatgaaaaagaaaatcacgagcagcatccggtctgtttggaaataaatgccataatccctggtgaagttggtaaagatccctgctccaggccctggcaatgatgactttactgagatacatccatacctcctttaatcacataccattctcgggaagcaaattgtcgaggcaaggtgatcatcggttcgtcgcgcgccgtaaattttaaatgatgccctgtaacactttcctcactatatatatcgccgccaacgggctcataatttaatagcgccttctgaggatcgcttgcctgacatgtccccaaaaaaagcgggtgtgttagtgggcaacttctccgccccaggtaaggtgtataccgaggctttaatactgctttttcaagttcactgataaccatcgttgcatggggtgttaaccagagagcgacggtaaaggaggcatcacataaatattcgcgccatgtttgaatcgtttcatgacttttcaaaccacggtaatcttctcgcgctccaaggactgtatggtaatcacgcaaccccgttacagacacacgacgatcgtcaagaatgagttcatcgcagcgcactgcaaattgcacactctcacttaacgcctgtaaactagaagtatcatcacgttggatcccaagacaagccccgagtagccctaataacccgcttcgggtcggaaatcttccggtaggtcgcgttccttcaaaggtcggctgcccccaggcttgcattggcccagcaagccgcaagatcaaataagatctcatgttcacgcctcgccattattacgaacccaggattttaactgttctaaagtaggcatttgtttaacttgagcagtaattgggtctacatcagataagctgaattgcgcagcagctccgttcagaccatatccattggcaacgcgatcccaatattgattaaacgcctgtatagacggttgcaaaaagccatctttcgctttaaccgctttttcaaaagcatttgccatagaaagtggcatatcggagaaattaaccattaccatatccgcagggttaaaagcggcataagtacgctgttttgctccagggacctctgttgccagcatatgaacaacatgggttgcaatttccagagcctgctccctggaggcaccacctaaattttcctgaagttgagcgaggttaatgttggcataacgataaaaaacaccgctactaaattcctgagttcccagatgtgcagaaccttgttcctgtaaatcatctacagcggtgaaccagtcaatatcagaatcaacctgatgagtagtgatcgcatgcgcaatggacattgcaccatcaacttttcccaactcagtcatcatgccgctggttgccattcttccactaagcgcaatatcaacaccctgctgtaaattcacacgtatggcggcaatatcttccttaagaactttgagcagctttttatcatccagattatcagcctctgcttttgcaacctgctcacagaaccaggctatttctcccacaacccagggagtaaccgcatcggcagaaatcttttcggcttcatcaacacttttaccggagagcagcgctaatgtcttatcgatgattttttggtcaaaacgttcaccaagtttttgccgaagaacatcacgtaattgtgcaagatgaatggttctgagactggattcaccaatattttgtgcgtaataaccacttttacgcatcgcacgtttaaggctttgactactaattcttactcgtcttttgccgccgaaaatagcgtctttctgcatgttcatatcgtcgcggttcagacaactagggctgtgagagatcagaacatgaatattgataaagttagacatagaaaggtttccttacgcatttttgtttgtggtcaatacaaaatcttccagaagttgctggcgttcgcgctttccccaccaggtcaacatcctggccattaatggccagtcaagtacgggttcggcgtgagtaagtaatcgacgtaactggaccatatcggctgttctgtcagcccgaattaattgaaagatacggcgctcgttaattcttccactattggctaaagctcttcccaagctgatacctgttgtttgctcgctttttttgtcctgatgtcggatgacattctttcctgcgctcaggcaaaacaccatgcgcaaaagagcctgctggtgacgtgggttttcccaaccaaaaggttgcaccagcctataaaacgcagggatatcgcgtaattcatcaggttcactaacacgtctaatttgcgcacaacttccattatccagttgttgccaggctcgatataaagccattgcatcaatttcatcagccattacttggccctccttgcggttttaactcccgtaaatgtttgtatagcgtggcgcgggcaagcgctaatgtgcttattaatttaggatgatgtgcatagggagctacagattgattaaatagcatttcacacaattgatgaagtttgtctcgtaaatcagctattacctcatcagcctgggaaaaattaacattcgccagtacatcgggaattaataattcactctgtcgatagaaatgcctttctgcagtctcatgaacagagactccggcccctttgaagtctttatttttaaacccttctgcaaaggtatataacgccttgcgtaaggctgttttatatcccaaaccaacagtcactatttcgtttatcacattgccgtattgttgccacccctgattaaacatcaacacatcatgacgccgttcaagaatagatgcttgattattacgatatccccccataatcaattcaagaggactttgcggcgcaatatttctgaattgattcacaaccgccgccacgcgatttccattttcattttgaataatcttatctaccacaactcggctgatttgtgtccaacttggtgcggaggtggtgaaagcaagaaatttttcctcaacctcccctttcttgactgttaccagacaaggggaatgcggatggggccatagcccattaactgtaaaggtaaatttttccttaagaaaaccggtataacgcaaattgctttcctgtccacagcaagaacatttaccaatcccaatgggatcgcataattcaatatgcgctggttgccagaatagaccacggacaaacccaatactgctagcaggtatagactcattggacttgataggtttaatccaggtaggttggttttccgtatgactttcattaggaaattgtttttgaagacgaggtaatgtgaggacattgagtaacaccgtactacgaagatcgatcccacgtacgaacgttgttacaggtgttcctccacgtaaaccgcttttaaaaccaccaccaaaacctggtgcctgattcgcctggttgaataacgcaatcgcagtgcatccaccacataatgcttcaccctgccccggttgattgacaaatgcacaattcgtcgcgccgcttaccccagccaacagtttttccattggagtcacatcatttgctttgacacctttggtctgcataaagggatgttctgcgtgattaaggtagaacatatctatccacggcgcgatgagttgttgaaactcatcttcagtgagcggattcattatgcgatgtcgaaattcaacgtcatcttttgccggggcgataatttgcccaatgcaaaccagcagtgctaaagcggccagttccatatcgtcacggggcaaacttaatcgccactgatctctactgcagtataggctttgcagatttatgatttggactttccccccgtttcgcgggcgtacagggatccagttatcaataagcaaattcatttgttctccttcatatgctccgacatttctcctgcatttctatacgtcggcacacttccgttatcggtaaaaacaaagaaaaaatacggcgtaattaattcaataatcacattcactgcaaaaatatattcattggtttaatacaattaacctatacatatattaagatgtgttgaattgtttaaagacaataatgcatgcatttcaaatctgcaagttattcgttttattattaaagaaacttttagttataataattaccatgaattttattacataaaatattcatactgtgaatataaaatctcataccgggaaattaaaagaagatgtacattgtgcaccttccctacttaagtagggataaaccgttattggtcttattatcgtcattgataacaatcattcccgaagttatttgggatttgcagggatgactctggtcatcccttcatcccctgtataggtaataacaatactgttaccctgccagacccatccatccagattctgtttcccttccagccaaagtaacccatcttcatctactacttcagaaaaactacgtttccaggtgaagggtacattgacgcgattaagtgcaagcgcctcatactgctgttcatgacttaggtcctcgtagacctggccatcgagcagttgtttaccactagacgtttgtacataaggcaataatggcaggctcatttccccatccctcgttaccgcaagaatggtttcatcgttatcctgcaagctatattcttcagcccactgcaggaccttgcgagccttgaaccttttttcacactcggcgctttcaaatttatccatgccattgccgacccattctggctcatccatttccgcatcatcgtaaatgctatccagccattgccggtaagcatcagggaaaaataaggatgctccattaagctcctcaatatgttgctgcgtccgccacatgactctaacgttgctataaatatgctcatgtcgtccgtaaccctcgccatcaggcagcaaaatggtggcaacaggaatctcaaaaccagcgggacgatatttgcgatgatggcgatgtaaacggcccaatcgttggaaaagcaaatctgcaggacaatgctgagtaattaaccaatcaaaatcaacgtcgagactttgttccacgacctgggttgcgacaagtatccgtccaacatttcgcttcccatttttgccgaaattgctaataactcgattctctttttcacgacgatcgttcagcgtaaagcgcgcatgaaacaaatctatatctacttgcgtgttatttagctcctttagccgttggtagcatacttgtgcaacgtcaaccaaattgcaaataagacagacctgtgcacccgcgtttgccgctgcgatcattcgctctaacatcgtaaggtcaggtaacatgtcagctaaacaaataggttctggctgaatgctaaagcggggcgggagttgttctggatgagctagcagatcaaaacgttgcgcaccattcacacctcgccagttaatgagtggatatgcggagttattttccactggatctgtatgcagaccataagtatccagaagtttctgtttttgtttcattggtagggttgcggaaagaagaataacactccctcccacatcagcctgagccttgagcactgcctccagcaagccgttcatataggtgtcgtaagcatgaacttcatcaacaattaaaacacttcgaccaattcccaaaccacggataaagcggtgtttaactggcaatacgcttatcaacacctgatcaatcgtgcaaacgccgatttgcccaagaaacactttcttattgctttgactcaaccactgacaacactgaacccacgcttcttcttgcccctgttcagtaatcgcgcgactttttatactttgaaagaggtggttaaaccgactattgccatgagcaagaataagatttggggaactaaataagtggctcgcgctcgcttccattctcgtaagcatagcattcgcggtagcttgtgttgggagggcaaaaataacactatccgcaatttgttgatcaataagtttccaagcataggccagcgctgtttccgttttaccggagcctgtaggtgcctctattaccgtcagcccgggagctactggaagagcatcaactaacacctgtaattgtctgggttgatagccattgtccagtagtgcatgaacaccttcataacatcgcttattacttacaagtccactcaactccaatacccggctcgcatcctgctgtcggtcctggaaatacgttctcagagcatttatgtcggaaggcgcatcctcattaaacagaaaggtattcgttgtagtccaggagcctaaccagtcagcaaggctgcaaaaacctgctaacagactactacaatcaggtggtatatcgtttatagataaccccgctggcgttaaaaataatgcttccagtacagatatccactcctcacgagcctgtttatcttgcgcagcataagatgccagagaagctggcatttcccaacggctcttatcttgatcctgggaatgtaatataaaaccatgatgtcctgtaacggcctctacccatggaaaccaggactcataaggatgaggagcggcatcaaaaaaactgaaaaaatccccgagagattgctcactaagactatcctggttaaaccaatacagaccggctgcaccatgattaaatttacggcacatttgtgtacttggaccattaagacttggcgttgcaggatttaatttcagccaactttctgcacttttatattggaatcgtatatcaaactttccaatatcatgaagagcaatgaaaaataacagccaggccttcaccctctgtttacttagcatttcatttcggcaaaaagtattttgcagtacgacactttgatcccaccagcaatctgcaacagcagcaacatcaaggcaatgataaattaacagatgaatatcatttcctttcgtcaagcttttactggattttccccagtaatggcatatatatttaaaaggttccattaatagcctccctgtttttttagtattatcgatgatatcagcgggctatttttcgatgctgctcataaatatcgaattacagtgatatacacatgtcttgcctccctgcaaagaagagactaacattcgaattgtttgggttcgaacgctggcctcaggttgatagaaatatcgcctggggcttttgtccatctggaacctcgcgaatgcttaacgccagacagcctcaagcacccgacgccattctatacctgataattcttcccgcggcgttcacgtttaaaatcaggaatgctgctcgcaaaataaaaacgcccccatcatttctgacagaggcgtttaatttgtccggcaatatttacccttcgtgtaacccacattccctttttaagccaaagaaacgcgtttcttcttccgccatgccgggttcccatttacgggttgtatgggtatcgcccacgcttaaatatccttcatcccataatgggtgatatttcaggccatgtttttgcaggtactgataaatagttcggttatcccagtcgataatcggcagcactttaaatacgccacgctgaattgccagcaccggtaaattggcacgactgccggattgttcacggcgcaggccagcaaaccaggtttgcgcattcagttctttcagagcccggttcatcggttcgactttgttgatgtcattgtacttttcaatgccttcaacgccctgctcccacagttttccgtagcgtgcttcctgccaggctgcgctttcggtagcacggtacactttcaggttgagcttgagtttgtccgttaactcgtcaataaagcggtaggtttccgggaacaagtaacccgtatcggtgaggatcaccggaatatccgggcgaatttgattcaccagatgcaggctcaccgccgcctgaatgccaaagctggaagaaagtacatattcaccgggcagattatccagcgcccaggctacgcggccttcagcgtccagtttttccagttcggcgttagtttccgccagcgccagaatgcgatctaccttcggcagttcgttcagggcgtttagatcgagtttggacatagattcctcactgtttgccttgcctgatgcgacgctcacgcgttcttatcaggcctacaagaccgggctgatggttaatcccacaaatcacgcgccggatcgagcaccgggcgaatgatgcccgcacgcaccgtaaagtcgccgaagccttcacccgcttcgcgctctttcgcccagcgccctatcagttcatcaaggctcgccaggatttccggctcggtgatgttttctttatacatccgtgggatacgtgtcccaatgcggttgccgccaagatgcaggttgtagcgacccggcgctttacccaccaggcccacttccgccagcatcgcgcgaccacaaccgttcgggcagcctgttacacgcatcacgatatgctcatcgctgacaccatgtttcgccattaaattatcgatgttgtcgataaaagacggcaggaaacgctctgcttccgccatcgccagcgggcaagtcgggaaactcacgcaagccatgctgttttcacgctgcggcgtgacggcattcattaacccgctctctttggcgatcttctcgatcttcgctttctcgctttccggtacaccggcgatgatcagattctggttcgccgtaatgcggaaatcgcctttgtggatcttcgcgatctccagcaggccggttttcagcggacgcgccggataatcaaggatgcgaccattttcgataaacagcgtcaggtgccagttatcatcaatgcccttaacccagccaatacgatcgcctcgtccggtgaactcatatggacggatcggttcaaatttgatccccgcgcgacgctccacttccgctttaaacgtctcaacccccacgcgctccagcgtgtatttggttttggcatttttacgatcggttcggttaccccagtcacgctgagttgtcacgacggcttcggccaccgccagcgtatgctccagcggcagatagccaaactcactcgcggtgcgggcgtaggttttcttgttgccgtgttcgatggaaagcccaccgcccaccaacaggttaaagcccaccagcttgccgttttcggcgatcgccacgaagttcatgtcgttggcgtgcagatcgatatcgttctgtggcgggatcactaccgtggttttgaatttacgcggcaggtaggtctggccgaggatcggttcttcatcagtagtggcgactttttcctggtcgagccagatctccgcatacgcgcgggtacgaggcaacagatgctcagaaatcttcttcgcccactcgtacgcttccgcgtgcagctggctctcgtaagggttgctggtgcagagtacgttacggttcatgtcgttagctgtcgccagcgcatcaagaccgacgctgtgcagcatctggtgcaccggtttgacgttctttttcagaatgccgtggaactgaaacgtctggcggttggtcaggcgaatgctgccatagatggtgttttcaccggcaaatttgtcgatcgcctgccactgtttagtggtaatcaccccacccggcagacgacagcgaagcagcatcgcgtggcgcggctccagcttctgttcagcacgttcggcgcggatgtcgcggtcatcctgctgatacatgccgtggaagcgaatcagcaggaagttgtcgcccttaaagccgccggtcagaccgtcgtttaaatcttccgcaatggtgccgcgcaggtagttgctttcatgcttcatgcgctcggcgtctgtcagttttccttcgaccactaaaggccctggatgtttttcgctcattagtagacatctcgctgataacggcgctctacgcgcagctcacttaaaaattcatccgccgcttcggtgtccatgccaccaaattcggcaatcacttccagaagtgcctgctcaacgtctttcgccatgcgattagcgtcgccgcagacataaatgtgggcaccatcattgatccagcgccacagctccgcgccctgttcgcgcagtttgtcttgtacgtaaactttttctttttgatcgcggctccaggcaagatcgatacgtgtcagcacgccatctttgacgtagcgctgccactccacctggtacaggaagtcttccgtaaagtgcggattaccaaagaacagccagtttttacctggcgcttcgtcggcggcgcgttgctgcataaaggcgcggaacggcgcaataccggtgcctgggccaatcataatcaccggggtttctggattggctggcaggcggaagttatcgttatgttcgataaatacgcggacttcgccctcttcttccacgcggtcagcgaggaagctggaggcaccaccggcacgggcgcggccttccacgtcgtaacgcaccacaccaacggtgacgtgtacttcgttctcgacttccgcctggctggaggcgatggaatacagacgcggcgtcagcgggcgcagcagattaattagcgcttcggcatcaagctgtgccggggagaaacgcaccatgtcaacaatcggcgtcgtcgcggcgtaatgctgtaacttcgctttatcgcccaccagcggcagcagtgtttcactgcgggtaagcgtggcgtaattctcaacaatgttggcggtgttgacggtcagttcgaagtgccactgtagcgcttcgttcagaggcaacgttttgccctcgacggtgacaggttcatcgcctttcagccacagcagttcgacaagttctttcaccagtgccggatcgttctgataccagacgcccagcgcgtcacccggctggtaacgcatgccgctgtcacctaagtcaatttcgatatggcgaacgtctttttcagagttacgcccggtaattttctggttaacagagaggctagccaccagcggcgcgtctttgctgtacgggctggtgtggatttcatttaccgcgccagtagcgacggattggctaggtgccgcgacaggcgcacggcttttaagcgcatcaaccacgcgggcgcgccactcgctggcagcagcctggtattcaacatcggcatcgacacggtcgagcaggcgttcaccacccagttccgccagcttgctgtcgaaatctttcccggactggcagaaaaattcataagagctatcgccgaggctaaacacggcaaacgcggtgttttccagctttggcgcttttttggagaacaggaacttatgcagcgcgacggcttcttccggcggttccccttccccttgcgtactcgtcactacgatgagcagtttttcgctggcgatttgtttgaatttatagtcgcccgcgttcaccagcttaacgttcagttttgctgctaataaatcatcacgtaatgcttcagcaacccggcgcgcattgccggtttggctggcggagataatagttatacccggcatttctgcggctggcgctggcgtcgctgcaagcgcagcaggctgctgattgagtacgccccagaaatagccagaaacccaggcaagctgggtgggagttaaatcggtcgtggccgcctgaaggcgtgccagttgctccgggttcaacggaagcaacgcggaaggtgggacctgtgtcgtcatgcgtcgttatgttccagtaagcaaagctgtttctgcgccctgtcagcgcccataaaacagaagagaaggtaaggttaacggggcaaacggtgtggattaaagacgggatagcgataactaataaccaaatcgactaacctgttttagcaatagtctttaacaacaaaatagattaaccaacctaatgaaaaacaaatgaatttagccaatcattaagataaatcagcgattttgcgcaacaaagtcgttttagataatgcgaaaaaacagcctttccggtactctacggcggttttatcgtcctgtagagaaattatgatgtccaccacgttatttaaagatttcaccttcgaagccgctcaccgcttaccacacgtcccggaagggcataaatgtggtcgcctgcacgggcattcctttatggtgcgactggaaattaccggggaagtcgatccgcatacgggctggattatcgatttcgctgaactaaaagcggcgtttaaaccaacctacgagcgcctcgatcaccattatctcaatgatattccaggtctggaaaacccaaccagcgaggttttagcaaaatggatttgggatcaggttaaacccgttgtgccgctgttaagtgcggtgatggtaaaagaaacctgcaccgcaggttgtatctatcgcggcgaatgataagagtgtgtcggcggtcaatttcccttaagtaacgctatgttagggtgttgtgttctggatatctggggcatgacatggaagacgactgcgacattattattattggtgccggtattgcaggcaccgcttgcgcgttacgctgcgcgcgagcgggtttatccgttttgttactggaacgcgctgaaatccccggcagcaaaaatctttccggcgggcggttatatacccatgcactcgcggaactcctcccgcaatttcatctgaccgcgcctcttgaacgacgcatcactcacgaaagcctttccctgttaacgcccgatggcgtaacgacgttttccagcttacagcccggcggtgaatcctggagtgtattacgtgcacgattcgatccgtggctggttgccgaagccgaaaaagaaggtgtcgaatgcatccccggagcgacggtggatgcactgtatgaagaaaacggcagagtctgtggcgttatttgtggtgacgatattctccgcgcccgttatgtggtgctggcagaaggtgccaacagcgtcctggctgaacgtcacgggttagtgactcgtcctgctggcgaagcgatggcgttggggatcaaagaagtgctgagcctggaaacatccgctattgaagaacgttttcatctggagaataacgaaggcgcagcgttgctgttcagcggcaggatctgtgatgacttacccggcggcgcatttctttatactaatcaacaaacgctcagcttagggattgtttgcccgctctcttcccttacgcaaagtcgtgttccggcaagcgagctgctgactcgctttaaagcgcatccggcagtgcgcccgcttatcaaaaacacggaaagtctggagtatggtgcgcatctggtgccagaaggtggcttgcacagtatgccggtgcaatacgccggtaacggctggctgctggtgggcgatgcgttgcgcagttgcgtcaataccggaatttccgtgcgcggcatggatatggcgctgactggcgcgcaggcggcggcacaaacgctgataagcgcctgccagcaccgcgagccgcaaaatctgtttccgctttatcatcacaacgtagagcgcagcctgctgtgggatgttctacagcgttatcagcatgttccggcgcttttgcaacgcccgggatggtaccgtacgtggcctgcgttaatgcaggatatttcccgcgatttatgggatcagggtgataaacctgttccaccgctgcgccagttattctggcatcatttacgtcgtcacggcctgtggcatctggcgggcgatgttatcaggagtctgcgatgtctgtaacgtaagatgttatcaggagtctgcgatgtctgtagcccgtaatctctggcgcgttgctgatgcgccgcacattgttccggctgactccgttgagcgccagacggcagaacggttgattaacgcctgtccggcaggtctttttagcctcacaccggaaggtaacttacgtattgactatcgcagttgcctggagtgtggcacctgccgtttgctgtgcgacgaaagtacactacaacagtggcgctatccgccttccggattcggcatcacctaccgctttggataaataataaggataatttatgcccctcttacacctgctccgccagaatccggtgattgctgccgttaaagataatgccagcctgcaactggcaatcgattctgaatgccaatttatttccgtgttgtacggcaatatctgcaccatcagtaatatcgttaaaaagattaagaacgccgggaaatatgcttttattcatgttgatttgctggaaggcgcgagtaataaagaagtcgttattcagtttttgaaactggtgaccgaggcggacggcattatcagtaccaaagccagtatgttgaaagcggcaagagcggaaggttttttctgtattcatcgcctgtttattgttgatagtattagctttcacaacattgataagcaagttgcgcaaagcaatccggattgtattgagatcctgccaggctgtatgcccaaagtgctgggctgggtgacagagaaaatccgccaaccgctgattgccggtgggctggtgtgcgatgaagaagatgcgcgtaatgcgattaacgcgggtgtcgtggcgctttccaccacgaataccggggtctggacgttagcgaaaaaattactttgacgggataatcgtaaccaattgaatttggtttgatttgtaggccgcacgccacatccgacattcagcgcctgatgcgacgcttgacgcgtcttatcaggcctacaagtccccaggccagaaccgtaggcaggatcatccggcaacacgttattggcaatctgcgtgaatgtttgtcaccagtgcctccagcaccactttccagtcatcaaccacgccaacatctgcctgactaaataccgcagcgctggcgtcatgattaatcgccaccacaaacttgctattgcgtacgcccgccattaacgctgctgcgccagaagcgccaacaacaatacacacctcaggtgccagcagatgtccggaaataccaatcactttttcagcatcaacgccaccgttcatcactcgcgcccgactgtagcccacttcggctcccagcttttctgccagcatagcgatttcctggttatctgcctctccgccctgccccaccaccagcacccgtctggcctcagctaatgggtcgcgggtaacatttttcagatcctctgtgctaaccagccagtccggaagcgcacccgggacaatgttcagttgttgcattccagagggcaacgtggcgtttttcgctgctcccgcctgacgcgccagggaaaggcatagcgggcgtttttctgtttgcagcgtcgccgttagcgcatttccccagtgggatttgcgcacgcttacggttggaatatctaagctagtcacctggcagatgcttgcaccatgtaaacgccaggccagccgggtgctcagttcatcgccaaacgttcccggcggaaagagaacaacgtccgcaggcgttcgctgccactgttccaccaacgcatccagcacctgttccgccactacaggctgaggttcaatctgccagtgcgccagggtacaaccgctgaaatcctgcgccgccagccagcttgctattgcggcattctcctgatttattgtcacaattgcgatattcatggctgcatcctttggcgtaaatagtcctgccatagcttttgagctttttctgctaccgtttgcccatcaatcagcgtcgctccgcgtcgttgctctgctcttgccagttgcagacactgcatcgctggcatttcggcagcaacagttttacggataatttctgctttccccgcagccattcgctggcgcattcccggtactggcaaggccacttcaccgcactgacgcacggcaatcaccgcaggcaagcgaacccggcaacaacgcaacccatgttcagtacgctgttcgagggtgataaacagcgcgtcgagagtgaaacgctccacctgggtgaagcagggccagcccagcatttccgccagcaaaaatggcgtttgcccattctgcccttcgctgctttggcagccggtaattatcagatccagcggattctgatgctgccattcggcaatatggcgagcgacaaattccggcgcaaagcgcagatctgccgccgtctccagcaatacagcttcctcaaacccaagagccatgagatagcgcagccagtgcaatgcccgttcatcccccatgctcaacgcggttaaagacatcggcgtaccgttttttctctgcgccaacagcagcgcggcagcggcctgttcatcagcaccgagtaaacttcgcagtaggctaatatccggtccgcttttaccctgagccgccgcctgccactctttttccgccagcattccggcatccggttcggctttaaacgctaacagaatgttcattcgcacctcctacatttcccgccgccaccagcgggagggctttagtttctggtgcccatagccaggtcacaacaaaaccaaccaacaacactgtcgccaggagcaataaggtgacttgcattccccactgcgccagcacccacggcagcaggccagtacttaccgccgcgccaagtcgactcatggcagtggcaaaaccgacgcccaggctgcgaatgtcagtaggaaaactttccgcaggcaaaatgcccaccagattactgactgcgctaatggtggtgctgaagagaacaaaaagcagcagcgttaaactactgccggaaggcaaacaggccatgactaccagcgttgccgccagcagcaaaaaacttcccagcaaaaatttgcgatgtgccagcaggtgcgtcagaactaatcccagcagcgcgcccacaattaacaacgcattaagcatcaggctggcagtcagcgcatcttccagaccaatagtctgggcgatagttggcagccaggtataaatcacaaaccatgggattacgaggcagacaaagaagacgctgttaaacgccgtgcgccgccagtaacggctagagaacaaggttttgatgtgtttatgggtcgccgttaccacttcatcgcccagtaaaacatggggaccaaaatagcgatgcacgatagcgtgagcttctgcaaaacgcccctggcgcagtagccagcgtggactttctggcgttccccagcgtaataacgtaatcaacaacgcgggcagagctgcgcttgccagtagccagcgccaggcctccgggttttcggaaataaagtgatgtccggcaatacttgccagcacatagcctacggtccacaccacgctgaatgcgcccagcaaaataccgcgatggcggcgcggggaaaattcagccagcaaggtgtgacctacactataatcgcctcccagaccaatgccaatcaaaatgcgcagtccaataagatgctctggcgtggtggcaaaaaattgtaaaaagctagcaagcgtaatcagcaaaaagctgaaggtgaagattttttgccgaccaatatggtcggagatccacccaagaaccaggctgccaaggaacaaaccaaggagcgcgctgccgccgatcattcccgccataaacggcgtcagttgcatggcgggcgtaagctgaataatggcgtaaccaatgacgccgagaacataaccgtcggtcaggtgtgcgccgaaagtgagcgcagcaatgcggcagtgaaaacggttaagcggtaaatcatccattcgcaccggactagtgttcatctttaccccttcattgtccggtaataagaacggcttctcgcctgagaagccgaaaaggcaacgccccgtcatcgcggaacgctgcctgacacattatttttcaatcggatagatagtacccgtattcataatgccattaggatcgaactgctttttcagcccttccagcaacgcccacgcgctgccgtgttccagtttgctccagtgaacgcgatgtttaccgataccgtggtggtgcaccatgctaccgccgaggcgaatggtttcttcacagatgatcttgttgagcggattgtggtacttgtcgatttcctcttccggcttacagtcaacgacgttgtaatcgtagacgaagtacatgttggtgccgttctgatagctatgagaggaatgaccgcccagcatggtgatgtcgtcggcgtgcgggaactcagtacgaatacggttaataacgctttcgtagatttcgtggatgcagctccagcagccggatacttcggtggtaaagcccatgttgccggttttgaggatctgcacacgttcggcagccactttatccggtccccagttcaggttgttaaaccaggtttcgatcagcttgctgtccacgcgctggcattgcgggtagcgggcaacgatttccgcaatcccttcgcccgtcaccttcgcaatgcgagggttaccttcagccataaagatcagcacgcattttccgtcggcaaaatgggtgaagtgttgggtgccatcttcagcgtcatacaaacgagcgatactcggacgatacccttccaccatgatttcacgcaggatgttgaagccggttttcatgtcttccaggatatagccgtagaagaggttgttttccggggtgaatttaaagattttcactgttacttcagtgatatagcacaatgcaccttcgttgccgatgatgatgtgacgaatgtccgggccagccgcgcggcgtggcacgtttttaatgcgtgtgacggtgccatcagccaatactgcttccagaccaacgaccatatcttcgattgcgccgtagagtgtggagaactgcccgatacttcgggttgctaccaggccgcccatctgcgccagcggcttactctgcggagaatgccccgtggtgtaacctttttcacgcaacgcgttttccagcacttccagcggaacaccacattgcgccgtcgcctgcatattctcaatatcaatattaatgatttgattcatggcggagccgtcgagcaccacgctgttttctacaacagtttccagcccaccttcggtggcggaagcaccggtacgcggcacaccgttaattttgtgcgcattcataaaattcagcacacgggatacttgctctgtggaaccgagttttacgaccgctgccggaatcggcaaagtataaatgccatgaatatccggaaatttacgaaaacggtcaatactgtttttctttaatactgtttcatcggtaattacgcgatctgcaccaacaatttcctttagctggtcgacaatcgctgcgcgagataaagacatagtaattccttcctgataataaaaatggaataatcattaataagagaaaacagaaaccaccgttatgggttagcgcactaaataaccgccatcaaccactaataaatgcccgttgacataattgcttgccggacttgcgaggaatacggctgcgcccattaaatcctgagtatcgccccaacggtttgccggaatatgatcaagaacgcgctgattggtttctggattactgcgtgtcgccagcgtaatatctgttgcataatagccaggggcgataccatttacctgaatattatattgacctagttcatcacaataagctttggtgaacccggcaagagcatgtttagtggcagaatatgcaggactccattgtccacctaagtaagagaacaaactacagatattaataattttgccgcttttctgcgggatcataatttttgcagcttcatagcttaactcgaatgcggcggtcaggttcacatcaatcatcggatcccagtcggcacgaccgaagtccagcaccttattcagcttacaaataccggcattgttaaccagaatatcaactgtaccgaaacgctcacagcaagcagcgataatcttctgcggcgcgccttctgcggtgatacccacctgcatgaagtccacctcaacaccctgtttttcaatcatttcctttgtttcgccgttatctttgacgaaactaggaataaagatatttgcgccagctttggccaacgccatggcaaatgcctggcctaaaccgctattcccaccggtaacaattgcggttttacctttcagggagaaaaaatccatactgaacgcattgagagattcgatactcatagttagctccaatttccgtaaggcaaaaaaaaagaaaggtaacttcccccgcgagagggaagttacctttctcattatctctggtaactggagataatttttagcataagggcataactgctaatgtgatcgtaatcacagtgtgatattcgtattgtcaaataattttaaaaagcagaagcgtgattactctcacacaacacctctgctttccatgttatttattatttcaattactagagacctgagaaaagtaatccacctgaaagggcggcttacttttctcttttttttgtctattacaaatgggaatacgatatgcaacacaacagttatcgccgttggataaccctcgcgataattagttttagcggcggcgttagtttcgacctggcttatttacgttatatttatcaaattcccatggcgaaatttatgggattcagcaataccgagataggtttaataatgagtacctttggtattgcggccattattctttatgcccccagcggcgttattgccgataaatttagtcaccgcaaaatgattacttccgcgatgatcattaccggattactgggtctgttaatggcaacgtatccaccgctgtgggtaatgctctgtattcagatcgcctttgcgataacgacgattttaatgctgtggagcgtgagcattaaagctgcaagcttgcttggcgatcatagcgagcaagggaaaattatgggctggatggaagggctgcgcggcgtcggtgtaatgagcctggcggtgtttaccatgtgggtcttttctcgctttgcaccggatgacagcaccagcctgaaaacggtcattatcatctatagtgtggtttacatcttgttggggattctgtgctggttttttgttagcgataacaacaacctgcgcagtgccaataacgaagaaaaacagagtttccagcttagcgacatcctggccgttttgcgtatcagcaccacctggtattgcagcatggtgatttttggcgtcttcaccatctacgccattctgagttactccaccaactatctgaccgaaatgtatggcatgagcctggtggcggcgagctacatggggattgtgatcaacaaaatattccgcgcgctgtgcggcccacttggcggcataatcaccacctacagcaaagtgaaatcccctacccgcgtgatccaaatcctttccgtactcggcctgctgacgttaactgccctgctcgtcacgaactctaacccgcaaagcgtcgcgatggggattggcctgattttactgctgggattcacctgttacgccagtcgcgggctgtactgggcctgccctggcgaagcgagaacaccgtcttacattatgggcaccacggtaggtatttgtagcgtgattggattcctgccggatgtcttcgtttacccaattatcggccactggcaagacaccctgcccgctgcagaagcctaccgcaatatgtggctgatgggcatggcggcgcttggcatggtgattgtctttacctttttgctgttccaaaaaattcgtactgctgatagcgcccccgcaatggctagcagcaagtaagccaggaaaattacaggagaaaaatcatgagcaaaaaatacatcatagggattgatggcggaagtcagagcacaaaagtggtgatgtacgatctggaaggtaacgtggtttgcgaaggcaaaggcttattacagccgatgcacacgccagatgccgatactgcagaacatcctgacgacgatttatgggcaagtttatgttttgccggtcacgatttgatgagtcagtttgccgggaataaagaagatattgtcggtattggtctgggatccatccgttgctgccgtgcgttattgaaagccgatggcacgcctgctgcgccgttgattagctggcaggatgcacgcgttacacgcccttacgaacacactaaccctgacgtggcatatgtcacctcttttagcggttatctgacgcatcgcttaaccggcgagtttaaagacaatatcgccaactattttggtcagtggccggtggattataagagctgggcatggagcgaagatgctgcggtaatggataagtttaatatcccccgtcatatgctgtttgatgtgcaaatgcctggcaccgtcctcggacatatcacaccacaagccgcactggcgacacatttcccggcaggactgccggttgtttgtaccaccagtgataaaccggtagaagctctgggggccggattactggatgatgaaacggcggtaatttctcttggcacttacatcgcattgatgatgaacggcaaagcactgccgaaagatccagtagcgtactggccgattatgtcttctattccgcaaacattgctgtatgaaggttacggtattcgcaaaggcatgtggacggtgagctggctgcgcgacatgctaggcgagagcttaattcaggatgccagggcgcaggatcttagtccggaagatttactcaacaaaaaagcttcttgtgtgccgccaggctgtaatggtctgatgacggtgctggactggctgaccaatccgtgggaaccgtacaaacgcgggattatgatcggctttgattccagcatggattacgcatggatatatcgtagcatactggaaagcgtggcgctgacgctgaagaacaattacgacaatatgtgtaatgaaatgaatcactttgcgaagcatgtgatcattactggcggcggtagcaacagcgatctgtttatgcagatttttgccgacgtgttcaaccttccggcacgacgtaacgccattaacggttgtgcaagcctgggggcagcgattaatacagcggtaggtctggggctatacccggattacgcaacggctgtcgataacatggttcgcgtgaaagatatctttataccgattgagagcaatgccaaacgctacgacgcgatgaataaaggcattttcaaagacctaaccaaacatactgatgtgatcctgaaaaaaagctatgaagtgatgcatggggaattggggaatgtggatagcatccagagctggagcaatgcgtaagtgaggaaggccgggcgggaaactgcccggcctgaacatacctgaatggttatccccgctgacgcggggaacataagttcgacaacttaaaaaatgataacaagtccggtttatccccgctgatgcagggaacataataaaaactttaactagttcggtttatccctgtttttacaaggaatattaactacactcgatgtctttagaataaaagacaatacgaatcgcactttatcaattttcacttaaagtatgaactggatatctttattcataagaactattcatcaacagcgtatagaggcggttatgtaaaaccactcattagcctcaaaacaaagacaaacttccagatttattacttaaccaatgaataacaagcttaaaaaatatactgttattctaaagaaaaaattaacaggcattaattcaatattaaaaaaataatagattaaaatttcttaacgatttaagaatcatacaaataacactttgattaaatttaattttttgtatcgataattgtgaacctctctggcatggagaactattttgaacatgaggtgttacgtggatatgttgcttattacaagtactgctaatataaaaacttgagaaagagataacgggttatatggtggtttatccccgctggcgcggggaactcgacagaacggcctcagtagtctcgtcaggctccggtttatccccgctggcgcggggaacacctgttttcgcaaatctatggactattgctattcggtttatccccgctggcgcggggaacacgggcgcacggaatacaaagccgtgtatctgctcggtttatccccgctggcgcggggaacactggctctgcaacagcagcacccatgaccacgtcggtttatccccgctggcgcggggaacacgaaatgctggtgagcgttaatgccgcaaacacaggtttatccccgctggcgcggggaacacattacgcctttttgcgattgcccggtttttgccggtttatccccgctggcgcggggaacactctaaacataacctattattaattaatgattttttaagccagtcacaatctaccaactttatagtatcacacaaacaacacatccattatgttaaagagcacttaatccattgattaaaaaggtaaatatttaaaataactctatacaaactaaaatctaccaaactttaccgcaataattttcactccagcgaaaaattaatgccacagaatttgtagagaatgctaatgattagccctggatgggtaaaatggaggagttttcagaggcgacaaacaatataaatgagtagaagtctttacaggttccacccatttataacgcttataaatgtttaatcaggcaatatttagatatttatgtgtttgcatgctcaaacgccaattacgcgcaatgcaggtttcaatgcacaaacgtgtggcatcatccttttggctaatcggctgcagtgcaatgactcgcggtttatcatcggtcagcgttgccagtagttcatccagtgcttcaatatcgcgtacgcgccccactggatgcttgatttcgttggctcgctccagtgcctgactcaacacttcatagccgccgcgcatgttcagctttgggcttacggtaacccaggtattcggtgtgcagcgtacctcatgagtaccactggtttcgatctggcagctaaaaccgttcttttcgagcagatcagtcagtggcagcaaatcatgaatgcaaggctcaccacccgtaatcaccacatgccgcgcggtgtatccctggcgaccaatgacagccagcaaatcttcactgctcgcagccccccacttatcactctctttggtcttcgccagaatgctgaaaagggagacttcccgatcctcaagcttttcccaggtgtgtttggtgtcgcaccaggcacagccaaccgggcatccctgtaaacgaataaaaatggcgggaacgccggtaaagtaaccctcaccttgcagggtctggaacatctcgttaatcgggtactgcatagcattctctgtgaagtggataattgttaattattgcagatcctgccacaacaatcatgtcttattaacattctgttacaggcaggtttaaagaaaaatgcgaaacatatcgttaataattaaagggagtaacgtattatgtcagaagaaaataaagaaaatggatttaatcatgtcaaaacattcaccaaaattatatttattttttctgtattagtttttaatgataacgaatataaaattaccgatgccgccgtcaatttatttatccagatttaatgagaaatttataatgcgctatttcatactaatgttcactttcgtatgttcctttgttgcagcccaaccaactattgtcccacaattacagcaacaagttacggatcttacgagtagcttaaacagtcaagaaaagaaagaactgacgcacaagttagaatctattttcaataatacccaagtgcaaattgccgtattaattgttcccacaaccaaagacgagacaattgaacaatatgctacaagagtttttgacaattggcgtttaggagatgccaaacgtaatgatgggatactgatcgttgttgcctggagcgatcgcactgtccgcatccaggtaggttatgggctggaagaaaaggtaaccgatgctctggctggagatatcatccgtagcaacatgatacccgcatttaaacaacaaaaattagctaagggattagagctagctataaacgctttgaataaccaactcactagtcaacaccaatatccgactaatcctagtgaaagtgaaagtgcgtcttccagtgatcattattactttgctattttttgggtatttgcagtgatgttcttccctttctggttttttcatcaaggcagtaatttttgtcgcgcatgtaaaagtggagtctgtattagtgcaatctatcttttagatttattcctgttctccgataaaattttttccattgctgtattttccttcttttttactttcaccatatttatggtctttacctgtttatgtgtacttcagaaaagagcatctggtagaagttatcatagtgacaacagcggttccgctggaggcagtgatagcggcggatttagcggcgggggcggttcttctggaggtggcggcgcatccggccgctggtaactcaaccataaaaaatgccagcccggaggctggcatttttaaatcagataaagtcagtcttatgcctggcctttgatctctttacgaccgttgtacggtgctttttcgcccagagcttcttcgatacgaatcagctggttgtatttagcaacacggtcagaacggctcatagaaccagttttgatctggcctgcagcagtaccaacagccaggtcagcgatggtagcgtcttcagtttcgccagaacggtgagagataactgcagtgtagccagcatctttcgccatcttgattgcagccagagtttcggtcagagaaccgatctggttgaatttgatcaggatggagttagcgatacctttttcgataccttctttcaggatcttggtgttggttacgaacaggtcgtcaccaaccagctggattttgtcgcccagaactttggtctggtatgcgaaaccgtcccagtcagattcgtccagaccgtcttcgatagaaacgatcgggtactgtttggtcagttcttccaggaagtgagtgaattcttcagaggtgaacgctttgttgccttcgccagccagaacgtatttaccatctttgtagaattcagaagctgcgcagtccatcgccaaagtgatgtctttgcccagttcataaccagcagctttaacagcttcagcgataacagccagagcttcagcgttggaacccaggttcggcgcatagccaccttcgtcaccaacagcagtgttcatgcctttcgctttcagaacttttgccaggtgatggaaaacttcagaacccatgcggatggcttctttcacagttttcgcgccaaccggctgaatcatgaattcctggatatcaacgttgttgtcagcgtgctcaccaccgttgatgatgttcatcatcggaaccggcatagagtatttgcccggagtaccgttcagttcagcgatgtgctcgtacagcggcatacctttagcagctgcagcagctttggcgttagccagagatacagccaggattgcgttcgcgccgaatttggatttgttttcggtgccgtccaggtcgatcatgatcttgtcaatgccagcctgatctttagcatctttgccaatcagcgcctgagcgatcgggccgtttaccgcagcaacagctttggttacgcctttacccaggaaacgggatttgtcgccatcgcgcagttccagagcttcacgggaaccagtagaagcaccactcggagcagctgccataccgacgaaaccaccctccagatgtacttcggcttcaacagtcgggttaccacgggagtcgatgatttcacgaccgatgatttttacgattttggacattaggttttcctcaagtcactagttaaactgaaactccagacaaacaacgcgtacccagggtacgcgttgccgctctaacttttttacttacttcgcctgacgtttctggaactcgctggcggctttcacaaagcctgcaaacagcgggtgaccatcacgtggagtagaagtaaactccggatggaactggcaagccacgaaccacgggtgattcggaacttcgatgatctcgaccaactgatcatccccggaacggcccgcaacgcgcagacctgcatcttcaatctgtttcaacagcatgttgttgacttcgtaacggtgacgatgacgctcaacaattgtcggcgcattgtacagctggcgaaccaggctatcgtcaaccaactggcactgctgtgcgccgagacgcatggtaccgccgagatcgctcttctcgctacgaacttcaacgttgccgttttcatcgcgccactcggtaatcagcgccacaaccgggtacttacagtctggcacaaattccgtagagttggcgttctccatgttggcaacatggcgagcgtaatcaattaacgccacctgcatacccaggcaaatgcccagataaggaatattgttctcacgcgcaaaacgcgcggtcgtaatcatgccttctacgccacgatagccgaaaccgccaggtacgaggattgcgtccagacctttaaggatttcaacgccgcgcgtttcaacatcttgactatcgatcagtttgatgttgacgctgacacgattcttcagcccaccgtgtttcagtgcttcgatcacacttttataagcatccggcagttcaatgtacttgccgaccataccgatggtgacttcacttaccgggttcgcttcttcgaagataacctgttcccattcggacagattcgcttccgggcagtttaagctgaatcgtttacaaatataatcgtccagcccctgagatttcaacaggcccggaattttatagatggaatcgacgtctttcagagaaataaccgctttttccggaacattacagaacaatgcaatcttcgcacgttcgttcgccggaacagcgcgatcactacgacaaatcaggatgtcaggctggataccgatggagagcagctcttttacagagtgctgagtcggtttggttttgacttcaccagacgctgccatgtacggcaccagcgtcaggtgcataaacagagtgtgctcacggccaatttcaacagccatctggcgaatcgcttcgaggaacggcaaggattcgatatcacctactgtaccgccgatttctaccagtactacgtcatgaccttcgccaccttccagcacgcgctctttgattgcgttagtgatgtgcggaataacctgcacggttgcgccgaggtagtcaccgcggcgttctttacgcagaacgtcagagtagatacgacccgtggtgaagttgttgcggcggctcattttggtacgaatgaaacgctcgtagtgccccaggtccaggtcggtttcagcgccgtcttcagtaacgaacacttccccgtgttggattgggctcatagtacctggatcgacgttgatgtacggatccagtttcatgatggtcacattgaggccacgggcttcaagaatggctgcgagggaggctgcggcaatgcctttacccagagaggatacgaccccgccggtcacaaaaatatagttcgttgtcatgctgaacctgagaagttaggttgaaaagacgatggaataaccaagacgggaaagcagtatacccgaacatgacctgtgccacaaactttcattatccctcctcttcgccagcgcactattgaaatcaggagtgagaaaatagcccctttggggtaaatgtttttgacgcaaatcaagcgcttgtcatttaaaaaatgacacaaatggcgcttgaccgcgtaattcccttagagatcaatttcctgccgttttacctgttgccagacttcttccattgtttcgaggtcaacacctgtcatttccagtccacgcgcggcaacaatacgctccacttcgcgaaaacgacgctcgaatttttcgttcgctttttgcaatgcgatttctgctttcgtccctaaatggcgagccagattaaccgtggcaaacagcaggtcccccatttcctcctccagtttagcctggtcgacaacagcctgccgcgcttcgtacatcacctcgtcgatctcttcgtagactttatcgactaccggaccaagcgtcgtccaatcgaagccaacgttggcgcaacgtttctggattttttgcgcacgcattaaagccggtaaactacgaggaatatcgtccagcgcgctatgctgcgctttctgcgcgcgctcttcggttttgatttgctcccaacgggcaagcacttcactactgttttcggcagaactatcagcaaaaacatgcggatggcgacgctctaatttatcgctaatagcagcgcaaatatcattaaagtcaaagcgcccttcttcctgagccatttgcgcgtaaaacaccacctggaatagcagatcgcccagttcaccgcgaagatcgtcaaaatcttcacgggcgatggcgtccagcacttcgtaggtttcttcaagggtgtaaggcgcaatggtggcaaatgtctgctctttatcccacgggcagccgttttccggatcgcgcaggcgctgcataatagtgagcaaacggtcgatttgattcattgaattgtcctgaaaattgcgggtctgtcaggtggaaacctgtgaccagaatagaagtgagttagtaacattacccaatcagtacgttaattttggctttaatgagttgtaattcctctggggcaactgttcctttcttcgttgctcctcttgcccgccaggcgatactttttacctgatcagctaacgctacgccatcacgttcctgaccggataaaacaacttcgaacggatatcctttactttgcgttgtacaaggaacacacagacacatacctgttttgttgttgtacatgaaaggactcaggacaacagctggacgatgtccagcttgctcgctaccttttgtcgggtcaaaatcaacccaaatcagatcgcccatatcgggtacgtatcggcttaccattaccagacttccttatctttcggctctccccagtcgatattctcgtggaggttttccggcgtgatgtcgttgaccagttcagcaagcgtaaatacgggctctttacgcactggctcaataattaatttgccatccaccaggtcaatcttcacttcatcatcaatattcagattgagcgcctgcattaacgtagccgggatccgcaccgccggactatttccccaacgctttacgctactgtggatcataaccctttcctcaaaccgctatcatatgtagatacagtatatatcaatctacattgtagatacgagcaaatttcggcttaactcccgtgcaaccgacgcgcgtcgataacatccggcacctggttgagtttacccagcacgcgccccagcacttgcaggttgtaaatctcaatggtcatgtcgatggtcgccagttgctgtttggtgtcgctacggctggcaacgccaagcacgttcaccttctcgttggcgagaatggtcgtgatatcacgtaacaacccactacgatcattagctaccacgcggaccaccaggctatatccggcggagtagctctcaccccataccgcgtcaacaatgcgttctggcgcatgggagcgcagttccgccagttgttcgcaatcggcgcggtgtacactaataccgcgcccctgggtaatgaagccgacaatctcatctccaggaatcggctggcagcagcgcgcgatgtggtgcatcaggttgccaacaccttcgactaccacgcgaccgttatctttactgcggttttgcggcgtgtagcttttttgctgaagttgcttcagcgcggcggcgtcctgctcttcggcactcggcttattaaattggctttgcaggaagttcaccatctgattgagacggatatccccgccaccaatcgccgccagcaactcgtcgacatcattgaagttgtaacgcggcagcagatgtttttctgcttctttcaggctgatccccagatgttccagctcgtcgtcaaggatttgccgcccagccagaatgtttttgtcacggtcctgtttacggaaccaggcgtgaattttgctacgcccacggctggttgtgacgtaaccgaggtttgggtttaaccagtcacggctggggttcggctgtttctgggtgataatttcaatctggtcgcccatctgcagctggtaggtgaacggcacaatgcgcccgccaatttttgccccgatgcagcggtgtccgacatcactgtggatgtggtaagcgaagtccagcggcgtacttcccgcaggcaaatcaacgacatcacctttcggcgtaaagacgtacacccggtcgtcaaagacctgactacgtacttcgtcgagcatttcgccggaatcagccatctcttcctgccacgcaatcagtttacgcagccaggcaatccggtcttcatgtccgctacgtgcgccgccagcagccgcgccctctttatatttccagtgcgcagcaacacccaactctgcatcttcatgcatctgtttggtgcggatttggatctcaacggtttttccacccggccccagaaccacggtatgaatagactgataaccgtttggtttcgggttagcgacgtaatcgtcaaactcatccggcaggtggcgatagtgagtgtgcactatccccagtgcggcatagcaatcctgtaaacgctcggcgacaatacgtaccgcacgcacatcaaacagctcatcaaaggcgaggttctttttctgcattttacgccagatgctgtagatgtgtttcggacgaccatacacttccgctttaacgccttcagctttcatctcagcgcgcagatgaccaacgaactcttcgatgtagtgttcgcggtcgagacgccgttcatgcagcagtttggcaattcgtttgtattcggttggatggaggtaacggaagcagtaatcttccagttcccatttcagttgtccgattccgagacggttagccagcggtgcgtagatgttggtacactcttttgccgccagtacacgttcatcttccggcgcatcttttacttcgcgcagatgagcaatacgctccgccagtttgatgactacgcagcgaaaatcatcgaccatcgccaataacatccggcgaacgttatcgacctgttcggaggaaacagaatcagtgtgcgtcgctttcagctggcggatcgccgccatatcacgcacgccgtgaataaggttaacgacgctcttaccgacgctctcacgcagcacatcttcgctgactacgttggcatccgccagagggaaaagcagcgccgcccgcagcgtgtcaatgtccatacttaatgtgctgaggatctccaccatctcaacaccacgccacaataacagactggcatccggatgcccctgcgtctgttgcagacaatacgcccaggtttcggctaagcactcacagctcttctggctggtaatacccagacttgcgatccatttttccggatcaaattcaccagccttattgatatgtgcacttcttaccgcaaccatcgtcctctcctttagggaccagacctgccgaaatcggcaaatcgcaattatttaacgcggctgaaaagtaccatgctttccagatgtcccgtgtgtgggaacatatccagcatcgccagtcgcgcaatggtatatcctgcttttaataacgcttcgctatcccgagccagcgttgcagggttacaggatacataaactatacgaataggttccagttttataatttgctgcataacacctgcggcacctgctcgcgccgggtccagcaacactttatcgaagccgtttttcgcccacggctgctttgtgacatcttcttcaagattttcgtgataaaacgtcacattctgtaagccattaagacgcgcattctgctggcctttttccaccagcgccggaacaccttctacaccgaccacactggcagcttgtgtcgccaatggcagtgtaaagttgcccataccgcagaacagatccagtacgcgatcttcaggttgcacatccagccattccaacgcacgcgctaccattttttggttcacacccgcattgacctgaataaaatcgcgcgggctaaaagttaagcgcaacccgttactgtcataccagggcatctcaccagagacggtttcgagtatctcactatcgggggcgagatacagatccaggccttcagaatggctaaagcgttccagtttttcgcgatctgcgctacttagcggtgcggtatggcgcaaaatcatcagcgtgccgctggttgcctgtaccagttcaacatgaccaagatggcgcatagcttgtaagctgcccagacatgccctgactttgggcagcaatgcttcaagttggggcgctaaaatggggcattgtttgacgtcgacaatgtcactggagcccgctttgcgaaaccccatctgaagttgctgtgttttcggtaagtagttcagacttaaacgcgcgcgacggcgatagccccagggaacatcggcgatcacttcagagacatcgtgtttcattaatcgggcgagtgccgcacttttgcttcgctgctgtaaatccacgctggcgtgttgttgctgacagccaccgcatacgccaaaatgaggacagcgtggcgtttcgcgttccgggctatcgcttaaccggcgtacgactttagcgcgggcatactgttttttatcttcagtaacagtaacttccgcgttttcctgcggcaataatccggggataaatagcgttttgccgttatgtcgcgccacgccctgaccaaaagagtcgaggtcgttgacactaacggttatgatctgacgcgtcgtcgtgcgtcgttttgcagagtagaattgcgccattggcgagactttctcaatttaacagtgtgaccttaattgtcccataacggaactccatgaccaactacagcctgcgcgcacgcatgatgattctgatcctggcaccgaccgtccttattggtttattgctgagtatctttttcgtcgtgcatcgctataacgacttgcagcgtcaactggaagatgccggtgccagcattattgagccgcttgcagtttctactgaatatggcatgagcctgcaaaatcgcgaatctatcggtcagttaataagcgtactgcatcgtcgccattccgatattgttcgcgcgattagcgtttatgatgaaaataaccgactctttgtcacctccaattttcatcttgatcccagtagtatgcagctcggcagcaacgtgccgtttcctcgccagctcactgtcactcgtgacggcgatattatgatcctccgcacgccgattatttctgagagttactcccccgacgaaagccccagtagcgatgccaaaaatagtcaaaatatgttgggatatattgcgctggagctggatcttaaaagcgttcgcttgcagcaatataaagagatctttatttccagcgtgatgatgctgttttgtatcggtattgcgcttatttttggctggcgcttaatgcgcgatgtaaccggtccgattcgcaacatggtgaataccgtcgaccgcatccgtcgcgggcaactcgacagccgggtggaaggatttatgctcggcgagctggatatgctgaaaaacggtatcaacagcatggcaatgagcctggctgcttatcacgaagagatgcagcacaatatcgaccaggcgacgtccgatctgcgtgaaacgctggagcagatggaaattcagaacgttgagttagatctggcgaaaaagcgcgcccaggaagcggcgcgtattaaatccgagtttctggcaaatatgagtcacgagctgcgtacaccactgaatggtgttattggctttacccgcctgacgctgaaaacagaattaacaccaacgcagcgcgatcacctgaatacgattgaacgtagcgcaaataatttgctggcaattattaatgatgttctcgacttcagcaaactggaagcaggtaagctgattctggaaagtattccattcccactacgcagcacgctggatgaagtcgttactctgctggcacattcttctcacgataaagggttagaactgacgctcaatattaaaagcgacgtgcctgataacgtgatcggcgacccgctgcgattacagcaaatcatcactaacctggtggggaatgcaattaaattcaccgagaatggcaacattgatattctggtagaaaaacgtgcgctgagtaataccaaagtgcagattgaagtgcagattcgggataccggcattggtattcctgaacgcgatcaaagccgcttattccaggccttccgacaggctgatgccagtatttcccgccgtcatggtggcaccgggctggggctggtgattacacaaaaactggttaatgaaatgggcggcgatattagcttccatagccagccgaatcgcggtagtactttctggttccacattaatctcgatctgaacccgaacattattatcgaagggccatccacccagtgcctcgcaggtaagcgcctggcctatgtcgaaccaaactccgcagcagcgcaatgcacgctggatattttaagtgaaacgccgctggaagtggtttatagcccaacgttctccgcgctgcctcccgcgcattacgacatgatgttgttaggcatcgcggtgaccttccgcgagccgctaacaatgcaacatgagcgattagcgaaagcggtaagcatgaccgatttcctgatgctggcacttccttgccatgcacaagtcaatgctgaaaaactcaagcaagatggtatcggcgcgtgtctgctgaaaccattaacacctacacgcctgttgcctgccctgacggaattttgtcatcacaaacaaaacacgcttttgcctgtaaccgatgaaagtaagctggcaatgacagtcatggcggttgatgacaaccccgctaacctgaaacttatcggcgcattgctggaagatatggtgcaacatgtggaactttgcgatagcgggcatcaggcggttgaacgggcgaaacagatgccgttcgatttgatcttaatggatattcaaatgccggacatggatggcattcgggcctgcgaactcatccaccaactcccgcatcagcaacaaacgccggttatcgcggtaacggcgcatgcaatggccgggcaaaaagagaagctgcttggcgcagggatgagcgattatctggcgaaaccgattgaagaagagcgattgcataatttgttgttgcgctacaagcctggcagcggtatttcctctcgcgtcgtgacgcccgaagtcaacgaaattgtggtgaacccgaatgcgaccctcgactggcaactggcactacgccaggcagcaggaaaaaccgatttagcgcgcgatatgctgcaaatgttactcgatttcctgcctgaagttcgcaacaaagttgaggaacagctggttggagaaaacccggaaggcctggttgatttgattcataaactgcatggcagttgcggctatagcggtgtgccacgtatgaagaatctctgccaactgatcgaacaacagctacgtagcggtactaaagaagaagatttggaaccggagctgctggaactgttggacgagatggataatgtcgcgcgcgaagccagcaaaattctcgggtaatggatgtcttgtcgagtagcaatcggctttttatgacgctggtttcagattggtgacaaagtgcctgtgtttatgccggatgcggcgttaacgccttatccggcctacaaaaccaattaaattcaatgaattaaaaaatgatgtagacctgatacatagcacaacaggctattttgcgtttagcatcagtctcaaaccggctccagatagagccggttttggttttctgtcttaacgcaccatgcacgggcgcttgttatcgaacgtccagccaggaatcagatactgcattcccatcgcatcgtcacgcgcgccaagcccgtgtttctgatacagctcatgggctttcatcacttgatccatatcgatttctacacccagccccggtttttctggcacctgtaccagcccgcctttgatctcaaacggttctttggtcaggcgctgattgccttcctgccaaatccagtgcgtatcaatagcagtaattttacccggtgcagcggcggcaacatgggtaaacatcgccagggaaatatcgaagtggttgttagagtgactaccccaggtcaggccaaattcatggcacatttgcgccacacgtacgctaccttgcattgtccagaaatgcggatccgccagcgggatatcaacggattgcagggagagcgtatggcccatttgccgccagtcggtggcgatcatattggttgcagtcggtagacctgtcgcgcgacggaactctgccatcacttcacgcccggagaaaccttgctccgcaccacacggatcttctgcataagccaggctacctttcaggtatttaccgattttaatcgcttcgttcaggctccaggcaccgttaggatcgagcgtaatacgcgcctgcgggaagcgttgcgccagtgccacaatagactcggcctcttcttccccggccagtacaccgcccttcagtttgaaatcgttgaagccatatttttcatatgccgcttccgccaggcgcaccaccgcatccggcgtcatcgcttcttcatgacgcaggcgataccagtcgcaactgtcatccggctggctttgatacggcagcggcgtggctttgcgattaccgacgaagaacagataaccgagcatttcgacttcgctacgctgttgaccatcgcccagcaggcttgccacgtttacccccagatgctgccccagcagatccagcattgccgcttctatcccggtaactacatgaatagtggtacgtaggtcaaatgtctgcaaaccgcgcccaccagcatcacgatcggcaaaagtattacgcaccagcgtcagaacgtttttgtattcacccagcgttttacctaccaccagcggaatcgcatcttccagcgttttacggattttctcgccgccgggaatttcccctacgccagtgtgaccagaattatctttgataatcacaatattacgcgtaaagaacggtgcgtgtgcaccactcagattcatcagcatactgtcatgacccgccaccgggataacctgcatttcagtaacaacaggcgtcgtaaattgagaactcatatttatgtcctttttcagaatcaatgacggccgaaaacgggacgtttacggtcaaaggtccagccggggatcaggcactgcatcggacctgcgtcgttacgcgcaccgccaggcagacgtttataggcctcatgtgccttttgtacctgttcccagtccagttccacgcccagaccgggcgcatcaggaacggcaatttttccgtttttaatctccagcggattttgggtcaggcgacaatcgccctcctgccaaatccagtgggtatcgatagcggtaggattacccggtgccgccgcgcccacatgggtaaacatcgccagagagatatcgaaatggttattagaatggcagccccaggtcagcccccagtcgtcgcaaagctgcgccacacggactgcaccggaaagcgtccagaagtgcggatcggcaagtggaatatctaccgcattgagcatcaccgcatgacccatttcgcgccagttggtggcgatcatgttagtcgcgacgggcaagccggtcgcccgtcgaaattccgccatcacttcacgtccggagaagccctgttctgcgccgcatggatcttcggcataggtaagaacatcattcagccctttgcataaagaaatggcttcatcaagcagccatgcaccgttgggatcaacggtaatccgcgcatccgggaagcgtttcttcaatgcacgaacagtgtcgatttcttgctcgccaggtaacacgccgcccttaagtttgaaatctttaaagccgtagcgatcctgactggcttccgccagacgcacaacggcttcgctgttcattgctttctgatgccgcaactgataccactcatggttgcccggcgtattttccacataaggaagatcggttttggtccgatcaccgatataaaacagataaccgaggacggtaatagcctcgcgttgcttgcctggccctaacagttcgcagaccggaacattcagcgccttacctagcaggtcaagcaaagcggcttccagcgccgccacggcgttaacgcgtaattcaaaggtccaggcacctttaccgaaggtatcaaaatcggcggcctgattacctttatgcacctgctggaccactttattcagtcgcgcaacttcctggcccagaaccatcggaatagcatcgacaagcgtctgataaatcacatctccgcccggcgcttcaccaatgccggtatgcccggcgttatcggtgagtaccacaatattgcgggtgaaatatgcgttatgtgccccaccaatattaagcaacatgctgtcatgcccggccaccggaatgactttcatatcagtaataacaggactggattgtgtcgccatcttattgccccgcaacaggtttcaactcgatacgcttgatatcgcccaccagcaccaggtagctcagtaccgcgattaaggcatgaacaccaacataaatcagcgccccattaaagctgccagtcgtgccaacgatataaccaattgcgattggcgtgacgatgccagaaatgttaccgaacatgttgaacaggccaccggaaagaccgctgatctcttttggcgcggtatctgccattactgcccaacccagcgccccgatgcccttaccgaagaaggccagcgccataaagccgatgatcatccactcaacgttgacgtagttgcagaacaccatcaccatgctcagcaacatgcccattacgatcggtgttttacgcgcaatgttcaggcttcccgtgcggcgcatcagccagtcggaaataatcccacccagcacaccgccgataaaaccgcaaaccgccggaacggaagccacaaagcccgctttcagaatgctcatcccgcgtgcctgcaccagataaaccgggaaccaggtaataaagaagtaagtcagggcgttgatacagtactgaccgatataaacgccgatcatcatccgactccctagcagctgtttgatctgcccccacttcacgctgaacggcactttaactttggtgttttgctgatccatattgatcagcgcaccacccgcggcgatgtactccagctctttcttatttacccccggatgttgatttggctcgtggatgactttcaaccagataaagctgatgacaatccccagaccgcccataaagaagaagacgtgactccagcccacttcatgcgtcagccagcccataatcggcgcgaagatcaccgttgcgaagtattgagcggagttaaaaatgctcaccgccgttcccctttcctgcgccggaaaccaggccgcaacaatgcgactgttgccggggaaagatggcgcttcagcaagcccgaccaggaagcgcagcgtaaacagggcaacgataatgccgaatccactaaagatatcgacgaagccttgcagcaaggtaaacatgctccagataaagatgctccagaagtagacgcgtttactaccaaaacggtccagcaaccagccaccagggatctgcccgataacataagcccaactgaaagcagagaacacatagcccattcccacgggatcaaggccgatatctttggccatttcgctaccggcgatagagagcgtagcgcggtcgccgtagttgaaggatgtgacgataaacaacatcaccactatccagtaacgagcatttgtgcgtttttccacactgctcgcagcctgacttaaagaactcattgttgcactcctgaaaattcgcgttagccacgctcactctggactgcgacatcgccaggaaatcagaggtgacgtagggtgttttttgccgtttttataggtcgttcgccgaatacggcgcgtgtttatatctggcaatagcagtataaaaagcgcgccatagcggctcaccgtgcaacaacacaacattaatgcgttcaatgaggcccgattttggcattagccctggacggtggaatccacttcacggaaatgaaaacaagaacaagaaaggaagggttaaaacgaagaaataaagaagagtatgaaatggatcgcttgactccaggcaaacgccagtaaaaatccgcgctatgaagcagtttttactggcatttgcctgaaaagattcgattcagcaccgctaaaacgacatttaccgctcgctgaacatatcaggacaacagcgtgccccactgttcgacccacggattactttccgtttccggttccgggttctcactggcgtcaatcaacagcatttcgccaacccgctgagcgctctgttcctgcaacaaggcatcgaactgtttgccgccattgcagaaattcacataactactgtcgccgagcgcaatcacgccataacgcagattcggctggaagcccagactatctttgattccctgaaagagtggcacaatgctatcaggaaggtcgccctgcccggtcgtggacgtaaccaccagaacatacttatcctgatagggcagccagtcgcttaattcaggatcttcaaataccgttgctttgtggccctgcgcggtcagaatcgcttccgcttcttcggccactaacagactattcccgtacatggtgccgacaaaaataccaatttccgccataccgttttctccctggattaggaacttatctctccatcctgaccgcttggcgcactgaactcaaccctttcattttcaggaagcagaccgcgccagccaaattgacttaacgcctgcatccaggtgtcgtccaggcccgcgtgaatagtcagcggctcgccagtaaaaggatgcgtcaaactcaactgactggcatgtagcattaaccgctggaggccaaaatgctcagcaccgctgcgattctggcgtaaatcgccatgtttgctatcgccaataatcggatgacgcaaatgggcaagatgtcggcgaagctgatgtttgcgtccggttttcggctccagttccaccaggccgtagcgcgtggtcgggtaacgtccggtcgctaccggcatttctacggtcgccagaccgcgataatgcgtcactgctggctgcgggcctttatcttcgcgggcaaatttatcagcgattttgtccagttcttccaccagtggataatccagcaccgcttcttccatcaaccagccgcgcacaatcgcatggtaacgtttctggatttggtgctgttcaaactgttgtgccagcagccgtccggcctcgctggataatcccatcaacaacacaccagaagtgggtcggtccagacgatgagcagtaaaaacatgctggcctatctggtcacgcacggtttgcatgaccactactttctcgtcgcgatccagccagctgcggtgaaccagccagccggagggtttatttaccgcaaccagccattcatcctgatagagtatttccagcattagctcgcatcatccgcaaaaagagcatccagtttttccagctcagccagaataagcgcgcgttgcggatggtccgtcgccagcgccatttcataatagggtgcaacggcaaaagcgcccggtaacggctgtttgttatctaacaaatcgtgcattcgcgggatcagcacccactgcaaccactccagtggttccatggtgtccataaagaacggttgggtactattaaattgatgcggctggggttcatcgtttcgccagtgctgatgttcacgcagtaacgcttcaagcgcctgcaactggagacgaacgcggtcatgagtggtcataaagcaacctcaataagaaaaactgccgcgaaggatagcaggaataaaaaaagggagcactgtattcacagcgctcccggttcgtttcgcagcattccagctacttttgttgctccctgctcatccttgacaacttttcctctggccttgcggccaatcgttcatcctgaactattgcttcctgctcacaccaccccgatgtgatacttcatcctgaagtgtccctggccttcctgacccaccgaatcatcctgaccggttctcattctccatcctggaggtgtcctttaacgcgtcctgcgtcatcctcttcgcttcatccagaagcctttccctgaaacaccatcctggtgtgtcctgcagaagtgtcatcatcctgatgttcacttcgttgtctgactccctgtcgacgaagatagaatcgtctttttcgcgaagtcttacaaggcgcttacagacaatgccttaaggaaaatttcatatgaaagttaagaattaacaatcaacattttgattttaaatgaaaataacgattcttatctttttaagtattcgcttatttcctggcgatctcctacagagtctgtaagagatctctcacaaccagatggggtatttggattacagaagaggcttaagttgattaaggaattccgcaagattactggctaaatgcgtccgtttacgtgttcccagcgtctctttgcacacttcaccggagagattacacacgctgatgacctctaactcttcttccagcgtcgcgataaatagtgtgggcggcagttttagccttttctgagtcaccagatgaccaatcagattttcctgcacccgacggaagtcgtcttcactccaggtttgcagcaatgtcagtttgatatcgccaaactgcgcgtgcatatccccggcaaactgagtcgtataaaaggtatgaattgtgggttgtatcacaatatcaaaagcgcgttcaaccgcgtttacattttgttccccggtaaacggctggggttgccagtatacggcatcttcggtagtactaataatgcacggactaggaacaccgtacagttcctcacttaacggccagcttttatgctcttcatgccacgcatcgcagtagcgtgcagtaaaatctttcagggcttgtgcggtcaaatcgtccactaatttctctcttcacttaaaccagatacacttgtcgtttagtttatctggtttatgacggtgaaacatgtcttcttatgcaaaccatcaggcacttgcgggcctgactcttggaaaaagtaccgattaccgggatacctatgacgccagcctactgcaaggcgttccacgcagcctgaatcgcgacccgctgggtctgaaagcggataacctgccttttcacggtacggatatctggacgctgtatgaactttcctggctgaatgcgaaaggtttgccgcaggtcgctgtcggtcatgttgaacttgattacaccagcgtaaatctgattgagagcaagagttttaagctctatctcaacagttttaaccagacgcgttttaataactgggatgaggtgcgccagacgctggagcgcgacttaagcacttgcgctcagggtaagattagcgtggcgttatatcgtcttgatgaactggaaggccagccgataggtcattttaatggcacttgcattgatgaccaggatatcactatcgataactatgaattcactactgactatctggagaatgccacctgtggtgaaaaagtagtggaagagacgcttgtcagccacctgctgaaaagtaactgcctgatcacccatcaaccagattggggtagcctccaaattcagtatcgtggacgccaaattgacagagaaaaactgctgcgttacctggtcagtttccgtcatcacaacgagttccacgaacagtgcgtggaacgcatctttaatgacctgttacgcttctgccagccagaaaaattgagcgtttacgcacgttatacccgtcgtggcggtctggacattaacccgtggcgcagtaatagcgattttgtcccaagcaccacaagactggttcggcaataaatttttctcaattttgcgtgctggattcacgcagaaggttgtgaaaggtcatcaggcagggctattgtaatcaaagggaatgacgatattcgtcccataaggagtttttcttgattacacatattagcccgcttggctccatggatatgttgagccagctggaagtggatatgcttaaacgcaccgccagcagcgacctctatcaactgtttcgcaactgtagtcttgccgtactgaactccggtagtttgaccgataacagcaaagaattgctgtctcgttttgaaaatttcgatattaacgtcttgcgccgtgaacgcggcgtaaagctggaactgattaatcccccggaagaggcttttgtcgatgggcgaattattcgcgctttgcaggccaacttgttcgcggtcctgcgtgacattctcttcgtttacgggcaaatccataacaccgttcgttttcccaacctgaatctcgacaactccgtccacatcactaacctggtcttttccatcttgcgtaacgctcgcgcgctgcatgtgggtgaagcgccaaatatggtggtctgctggggcggtcacagtattaacgaaaacgagtatttgtatgcccgtcgcgtcggaaaccagctgggcctgcgtgagctgaatatctgcaccggctgtggtccgggagcgatggaagcgccgatgaaaggtgctgcggtcggacacgcgcagcagcgttacaaagacagtcgttttattggtatgacagagccgagcattatcgccgctgaaccgcctaacccgctggtcaacgaattgatcatcatgccagatatcgaaaaacgtctggaagcgtttgtccgtatcgctcacggtatcattatcttccctggcggtgtgggtacggcagaagagttgctctatttgctgggaattttaatgaacccggccaacaaagatcaggttttaccattgatcctcaccggcccgaaagagagcgccgactacttccgcgtactggacgagtttgtcgtgcatacgctgggtgaaaacgcgcgccgccattaccgcatcatcattgatgacgccgctgaagtcgctcgtcagatgaaaaaaagcatgccgctggtgaaagaaaatcgccgtgatacaggcgatgcctacagctttaactggagtatgcgcattgcgccagatttgcaaatgccgtttgagccgtctcacgagaatatggctaatctgaagctttacccggatcaacctgttgaagtgctggctgccgacctgcgccgtgcgttctccggtattgtggcgggtaacgtaaaagaagtcggtattcgcgccattgaagagtttggtccttacaaaatcaacggcgataaagagattatgcgtcgtatggacgacctgctacagggttttgttgcccagcatcgtatgaagttgccaggcagtgcctacatcccttgctacgaaatctgcacgtaatctccgctcccccggtgacgtttgttgccgggttttctcgtttttggtcacttactcatcaactcatttcatttgttatatgaatgtttctcaccaccctcacgcgacaaatatcatcacagttaatatgtcatacaatttatgttgcaacgcaaacgtttccctattttcataaaccgtattttatcgctatgaaaaagaaattatcgccatgattaactaaaagtattgattttttcagttcaacctacatatattgcgcgccccggaagaagtcagatgtcgtttaatgggcaaatattgcccttaaattctcttttacttttgatttacagagtaaagcgttgggataatctatcttccaagtagattattgtatttgagatcaagatcactgatagatacataacttgtgtgtatctttccgccctcaaattattacggcggtaaatgattaagccatcgccgatagacagatttcatttttacggtcaggcaccttcccgggctgaactggctaaaagctgaattatttgcattcctccaggagaaatagatggaaacgactcaaaccagcacgattgcgagcaaagactctcgtagtgcctggcgcaagacagacaccatgtggatgctgggcctttacggcacggcaatcggcgcgggcgtgctgttcctgccaatcaacgccggtgttggcggtatgatcccgctgatcatcatggctatccttgcgttcccgatgacgttttttgctcaccgcggcctgactcgcttcgtactgtctggtaaaaacccgggcgaagacatcaccgaggttgtagaagaacactttggtattggcgcaggtaaactgattaccctgctctacttcttcgctatctacccgatcctgctggtttatagcgtggcaatcaccaataccgttgaaagcttcatgtctcaccagctgggtatgacgccaccgccgcgtgcgattctgagcctgatcctgatcgtgggtatgatgaccatcgttcgcttcggtgagcagatgatcgttaaagcgatgagtattctggtattcccgtttgttggcgtactgatgctgctggctctgtacctgatcccgcagtggaacggcgctgcactggaaacgctgtctctggacactgcatctgcaaccggaaacggtctgtggatgaccctgtggctggcaattccggtaatggtgttcagcttcaaccactctccgatcatctcttctttcgccgttgcgaagcgtgaagagtacggcgatatggcagaacagaaatgcagcaagatcctggcattcgcacacatcatgatggtgctgaccgtaatgttcttcgtcttcagctgtgtactgagcctgactccggcagacctggctgcggctaaagagcagaacatcagcattctgtcttacctggctaaccactttaacgcaccggttatcgcgtggatggctccgattatcgcgattatcgctatcaccaaatccttcctcggtcactacctgggcgcacgtgaaggcttcaacggtatggtgattaaatctctgcgtggtaaaggtaagtctatcgaaatcaacaagctgaaccgtatcactgcgctgttcatgctggtaacgacctggattgttgccaccctgaacccgagcatcctgggtatgattgaaaccctgggcggtccaatcatcgcgatgatcctgttcctgatgccgatgtacgcaattcagaaagtaccggcaatgcgtaagtacagcggtcacatcagcaacgtattcgttgtcgtgatgggtctgattgcaatctccgcaatcttctactctctgttcagctaagtcctttcgcgccgctttcgggcggcgcttcctccgttttaacgcgatgtatttcctatgattagcgtattcgatattttcaaaatcggcattggcccttccagttctcataccgttggaccaatgaaagcgggtaaacaatttaccgacgatctgattgcccgtaacctgcttaaagacgtgacccgcgtggtggttgacgtgtacggcagcctctctctgaccggtaaaggccaccacactgatatcgccattattatgggcctggcgggtaacctgccggataccgtggatatcgattccatccccagttttattcaggatgtgaatactcatggtcgcctgatgctggcaaacggtcagcatgaagtggagttcccggttgatcagtgcatgaacttccacgccgacaacctttctctgcatgaaaacggtatgcgcattaccgcgctggcgggcgataaagtcgtttacagccagacttactactctattggcggtggctttatcgttgatgaagagcattttggccagcaggatagcgcaccggttgaagttccttatccgtacagtagtgcagccgatctgcaaaaacattgtcaggaaaccgggctgagtctctctggcctgatgatgaaaaacgagctggcgctgcacagcaaagaagagctggaacagcacctggcgaacgtctgggaagtcatgcgcggcggtattgagcgcggtatttccaccgaaggcgtgttgcctggcaaactgcgcgttccacgccgtgctgcggcactacgccggatgctggtcagccaggataaaaccaccactgacccgatggcggttgttgactggatcaacatgtttgcactggcagtgaacgaagagaacgctgctggcggtcgcgtggtgactgcgccgactaacggtgcgtgcgggattatcccggcagttctggcgtactacgacaagtttatccgcgaagtgaacgctaacagtctggctcgttacctgctggtagccagcgccattggttctctttataagatgaacgcgagcatttctggtgctgaagtgggttgccagggtgaagttggcgtggcgtgcagtatggcggcggctggtctggcagaactattaggcgcaagcccggcgcaggtgtgcatcgcggcggaaatcgccatggagcacaacctcggtctgacgtgtgacccggtcgccggacaggtacaggtgccatgcatcgagcgtaacgccattgcggcagtaaaagcggtgaacgccgcacgtatggcgctgcgccgtaccagcgagccgcgcgtctgcctcgataaagttatcgaaaccatgtacgaaacaggtaaagatatgaacgccaagtaccgcgaaacctctcgcggcggcctggcaatgaagatcgttgcctgcgattaatcgctctccaaaggcctcgttttgcgaggcctcttcccgatttctcatccagccgtagcctgttccggcatcgaatgttacccttatcgcctgatctttaagggggttatcgtggctgttcatttgcttattgtcgatgcactgaatcttattcgtcgcattcatgccgttcaggggagcccctgtgtcgaaacctgccagcatgcgctcgatcagctcattatgcacagccagccaacccacgcggtcgccgtttttgatgatgaaaaccgcagtagcggctggcgtcatcagcgtttaccagattacaaagcgggtcgaccgccaatgccggaagagttgcacgacgagatgcctgcattacgcgccgcctttgagcaacgcggcgtcccgtgctggagtaccagcggcaacgaagccgatgacttagccgccacgctggcggtcaaagtgacacaggccgggcatcaggcaacgattgttagcacagataaaggctactgtcagttacttagtccgacattacgtattcgtgattacttccagaaacgttggctggatgcgccatttatcgataaagaatttggcgttcaaccgcagcagttgcccgattactggggacttgcggggatcagcagtagtaaggtaccgggtgttgcgggaatcggaccaaaaagcgccacgcagctgctggtcgagtttcagagtctggaagggatatatgagaatctggatgcggttgccgaaaagtggcgcaaaaaattagaaacccataaagagatggcgtttctgtgccgcgatattgcccgcttacaaaccgatttgcatatcgacggcaatttacagcaattgcggttggtacggtaacggcgagccggatacgccgcaaacgtcgtatccggcattatcacatcagcgcatttaccaggcggtatggtaaagctctacaatatcctcaagcgttgcttcacgcgggttgccaccggtacaaacatcatccagtgccgcctgcgccagtgccggaatgtcttccttgcgtacaccaacatcacgcaaatgtggcggaataccgacatcacggttgagagcaaacaccgcttcaacagcggcattacgcgcctcttccaggctcataccttccactttcacgcccataacgcgcgcgatatcgcggtacttctcaccggtaaagtcagcgttataacgcatgacatgcggtaacaggatggcgttcgcaacaccgtgtggagtgttataaaacgcgcccagtggatgcgccataccatgcaccaaccctaacccaacattgctgaagcccatacccgcaacatactgcccgagcgccatttcttctccggcatccttatcaccagcaacgcttcctcgcagcgccccagcaatgatttcaatcgctttaatgtgcagtgcatcggttagcgcccacgcgccacgggtaatatacccctcaatagcatgagtgagcgcatcgacacccgtcgcagctttcagcgctggaggcataccatccatcatgtcagcgtcaataaacgccacctgcgggatatcatgcggatcaacgcaaacaaacttgcgccgtttctcttcgtcagtgatcacgtagttaatggtcacttctgccgcagtacctgctgtggtaggaattgccagaatcggtacactgggtttattggtcggggaaagcccttccaggctacgcacatcggcaaactccgggttgttgctgataatgccaatcgctttacaagtatcctgtggagaaccaccaccaatagcgatcaggtaatccgcgccgctattctggaatacaccgagcccttctttgacgacagtaattgttgggttgggcactacgccgtcgtaaatcgcccatgccagccctgcagcatccatcttatcggtcactttcgccaccacgccgcattgcaccagcgttttatcggtgacgatcagcgccttctgataaccacggcgtttcacctcatcggttaaagccccaacagcaccccgaccaaaccatgccgtttcgttcagaatcattctgttagccatcatccttctccttgttgctttacgaaattactcttcaattcgtaacccataggttttgaatttctccagcactacggcaatctcttcatcgctcagcactggcaccgggtccgtaatcgccagggtcgtcaggtaaagttgcgccagcacttcaacttcatgcgccagccataacgctttttccagattcacctcacaagcgataagcccatgatgttgtaacaaagttgccttacgatttttgagagccagcgcaacatgttcagaaagttcgcgtgttccaaaggtcgcataaggcgcgcaaggaatagaattaccgccagccgccgcaatcatgtagtgaatagcggggatgcttcggttaagaatggaaactgccgtgcaatgaacggcatgattgtgaacaaccgcgttggcatccggtctgctttgataggctgccatatggaaacgccattcgctactggggagctttccttcctcatgtttaccgttgccatcaataaagacaatatggctctccgtcagtttttcatatggaatgcctgtaggcgtaatcagcatcccatcctgataacgtacactgacgttccccgctgtcccctggttcagtcccaggcgggtcatttccaggcaagtgtcaataatctgacgagcaagtttatttcgttccattagctacctctctctgattcaaaacagggcaataatgttgttcctttcacactattgaattagccgtttaattacccaccatcttcttcctgattaacaagaaagaaattcacaagcttatattttgtgacctggttcaactaatcacagtaaataactgcaagttctctttttataaccccattaaaaatgaccgctcttaaaaatatttatcaaaacggtcatttttctattcctccaagcccggaatgaccgttttcggcacaaacaattaatacggtcatctgatttgtgttttttatgatttattttctgaaacgggcatgaaatttcgattattaaagtgatggtagtcacataaagtcaccttctagctaataagtgtgaccgccgtcatattacagagcgttttttatttgaaaatgaatccatgagttcatttcagacaggcaaatattcactgatatgaagcccgaactcgctggttttgcacttttgaaaacataaccgattacgtgcttaagcttctgaacctaagaggatgctatgggaaacacaagtatacaaacgcagagttaccgtgcggtagataaagatgcagggcaaagcagaagttacattattccattcgcgctgctgtgcagtctgttttttctttgggcggtagccaataaccttaacgacattttattacctcaattccagcaggcttttacgctgacaaatttccaggctggcctgatccaaagcgccttttactttggttatttcattatcccaatccctgctgggatattgatgaaaaaactcagttataaagcagggattattaccgggttatttttatatgccttgggtgctgcattattctggcccgccgcagaaataatgaactacaccttgtttttagttggcctatttattattgcagccggattaggttgtctggaaactgccgcaaacccttttgttacggtattagggccggaaagtagtggtcacttccgcttaaatcttgcgcaaacatttaacagctttggcgcaattatcgcggttgtctttgggcaaagtcttattttgtctaacgtgccacatcaaagccaagacattctcgataaaatgtctccagagcaattgagtgcgtataaacacagcctggtattaagcgtacagacaccttatatgatcatcgtggctatcgtgttactggtcgccctgctgatcatgctgacgaaattcccggcattgcagagtgataatcacagtgacgccaaacaaggaagcttctccgcaagcctttctcgcctggcgcgtattcgccactggcgctgggcggtattagcgcaattctgctatgtcggcgcacaaacggcctgctggagctatttgattcgctacgctgtagaagaaattccaggtatgactgcaggctttgccgctaactatttaaccggaaccatggtgtgcttctttattggtcgtttcaccggtacctggctcatcagtcgcttcgcaccacacaaagtcctggccgcctacgcattaatcgctatggcactgtgcctgatcagtgccttcgctggcggtcatgtgggcttaatagccctgactttatgcagcgcctttatgagcattcagtacccaacaatcttcagcctgggcattaagaatctcggccaggacaccaaatatggtagctccttcatcgttatgaccattattggcggcggtattgtcactccggtcatgggttttgtcagtgacgcggcgggcaacatccccactgctgaactgatccccgcactctgcttcgcggtcatctttatctttgcccgtttccgttctcaaacggcaactaactgaacatattttccgaataaagtgaggaatctgtaatgaaaaaaatcagcttaccgaaaattggtatccgcccggttattgacggtcgtcgcatgggtgttcgtgagagccttgaagaacaaacaatgaatatggcgaaagctacggccgcactgctgaccgagaaactgcgccatgcctgcggagctgccgtcgagtgtgtcatttccgatacctgtatcgcgggtatggctgaagccgctgcttgcgaagaaaaattcagcagtcagaatgtaggcctcaccattacggtaacgccttgctggtgctatggcagtgaaaccatcgacatggatccaacccgcccgaaggccatttggggctttaacggcactgaacgccccggcgctgtttacctggcagcggctctggcagctcacagccagaaaggcatcccagcattctccatttacggtcatgacgttcaggatgccgatgacacaagcattcctgccgatgttgaagaaaaactgctgcgctttgcccgcgccggtttggccgtcgccagcatgaaaggtaaaagctatctgagcctgggcggcgttagcatgggtatcgccggttccattgttgatcacaacttctttgaatcctggctgggaatgaaagtccaggcggtggatatgaccgaactgcgtcgccgtatcgatcagaagatttacgacgaagccgaattggaaatggcactggcctgggctgataaaaacttccgctatggcgaagatgaaaataacaaacagtatcaacgtaatgccgagcaaagccgcgcagttctgcgcgaaagtttactgatggcgatgtgtatccgcgacatgatgcaaggcaacagcaaactggccgatattggtcgcgtggaagaaagtcttggctacaacgccatcgctgcgggcttccaggggcaacgtcactggaccgatcaatatcccaatggtgacaccgccgaagcgatcctcaacagtagttttgactggaatggcgtgcgcgaaccctttgtcgtggcgaccgaaaacgacagtcttaacggcgtggcaatgctaatgggtcaccagctcaccggcaccgctcaggtatttgccgatgtgcgtacctactggagtccagaagcaattgagcgtgtaacggggcataaactggatggactggcagaacacggcatcatccatttgatcaactccggttctgctgcgctggacggttcctgtaaacaacgcgacagcgaaggtaacccgacgatgaagccacactgggaaatctctcagcaagaggctgacgcttgcctcgccgctaccgaatggtgcccggcgatccacgaatacttccgtggcggcggttactcttcccgcttccttaccgaaggcggcgtcccgttcaccatgactcgtgtcaacatcatcaaaggcctgggaccggtactgcaaatcgcggaaggctggagcgtggaattgccgaaggatgtgcatgacatcctcaacaaacgcaccaacagtacctggccaaccacctggtttgcaccgcgcctcaccggtaaagggccgtttacggatgtgtacagcgtaatggcgaactggggcgctaaccatggggttctgaccatcggccacgttggcgcagactttatcactctcgcctccatgctgcgtatcccggtatgtatgcacaacgttgaagagaccaaagtgtatcgtccttctgcctgggctgcgcacggcatggatattgaaggccaggattaccgcgcttgccagaactacggtccgttgtacaagcgttaatacattactccctgatgtgatgcccggtcgctccggctaccgggcctgaacaagcaagagtggttagccggataagcaatgttatccggctatattgcaggagcgattatgaaacaagaagttatcctggtactcgactgtggcgcgaccaatgtcagggccatcgcggttaatcggcagggcaaaattgttgcccgcgccagtacgcctaatgccagcgatatcgcgatggaaaacaacacctggcaccagtggtctttagacgccattttgcaacgctttgctgattgctgtcggcaaatcaatagtgaactgactgaatgccacatccgcggtatcgccgtcaccacctttggtgtggatggcgctctggtagataagcaaggcaatctgctctatccgattattagctggaaatgtccgcgaacagcagcggttatggacaatattgaacggttaatctccgcacagcggttgcaggctatttctggcgtcggagcctttagtttcaatacgttatataagttggtgtggttgaaagaaaatcatccacaactgctggaacgcgcgcacgcctggctctttattagcagcctgattaaccaccgtttaaccggcgaattcactactgatatcacgatggccggaaccagccagatgctggatatccagcaacgcgatttcagtccgcaaattttacaagccaccggtattccacgccgactcttccctcgtctggtggaagcgggtgaacagattggtacgctacagaacagcgccgcagcaatgctcggcttacccgttggcataccggtgatttccgcaggtcacgatacccagttcgccctttttggcgctggtgctgaacaaaatgaacccgtgctctcttccggtacatgggaaattttaatggttcgcagcgcccaggttgatactagcctgttaagtcagtacgccggttccacctgcgaactggatagccaggcagggttgtataacccaggtatgcaatggctggcatccggcgtgctggaatgggtgagaaaactgttctggacggctgaaacaccctggcaaatgttgattgaagaagctcgtctgatcgcgcctggcgcggatggcgtaaaaatgcagtgtgatttattgagctgtcagaacgctggctggcaaggagtgacgcttaataccacgcgggggcatttctatcgcgcggcgctggaagggttaactgcgcaattacagcgcaatctacagatgctggaaaaaatcgggcactttaaggcctctgaattattgttagtcggtggaggaagtcgcaacacattgtggaatcagattaaagccaatatgcttgatattccggtaaaagttctcgacgacgccgaaacgaccgtcgcaggagctgcgctgttcggttggtatggcgtaggggaatttaacagcccggaagaagcccgcgcacagattcattatcagtaccgttatttctacccgcaaactgaacctgaatttatagaggaagtgtgaaatgctgaaaacaattagcccgttaatttctcccgaactattgaaagtgctggcagagatgggacatggagatgaaattattttttccgatgctcactttcccgcccatagcatgggaccgcaggtgatccgcgctgatggcctgttggtgagcgacttgctccaggcgattatcccgttatttgaactggacagttatgcaccgccgctggtgatgatggcggcggtagaaggtgacactctcgatcctgaagtagaacgacgttaccgtaatgcgcttagtctacaagccccgtgtcctgacatcatccgcatcaatcgttttgcgttttatgaacgggcgcaaaaagcctttgcgatcgttatcacaggcgaacgagcgaagtacgggaatattcttttaaaaaaaggggtaacaccgtaatctcataccggtacgcccgcatgacgcgggcggttatcgaatgatggggtgaaaaatatgaaagcggcacgccagcaagcgatagtcgacctgctgctgaaccataccagcctgaccacggaagctctctctgaacagctaaaggtcagtaaagaaaccattcgtcgcgatctcaatgaattacagacgcagggtaaaattctgcgcaatcatggacgcgctaaatatatccaccgtcaaaatcaagacagtggcgatccctttcacatcaggctgaaaagccattatgcgcataaagcagatatcgcgcgcgaggcgctcgcgtggattgaagaagggatggtgatagccttagacgccagtagtacttgctggtatctggcacgccagttgcctgacatcaacattcaggtcttcaccaatagccatccgatttgccatgaactcggtaaacgcgaacgcattcaactgatcagttccggcggcacacttgagcgcaaatatggctgttacgtcaatcccagcctgatttcccaacttaaaagcctggaaatcgatctgtttattttttcttgtgaagggatcgatagcagcggcgcactgtgggactccaatgcgatcaacgctgattacaaaagcatgctattaaaacgtgccgcgcaaagcttgttattgattgataaaagtaaatttaatcgtagtggggaagcccgcatcgggcatctggatgaggtaacgcacattatttctgatgagcgccaggttgcaacttctttggtaacagcctgacggaaagggtagcaggccggagacgacgccccggccttgcctgttatcgctcgtcgcgacgaccacccaccgcagcccagatgcggcggacgtgcaccgtcacttcttcgcgatcgtgatacaactgccgcgcctgaatctgagcatttatgccatgttcatcaagctgtgcctgaatatacgccagattgtgactcacttcttcgtagcgttttttcatcggcagtttgaggttgaaaatggtttcacggcaccagccattaaccagccactgtgccatcaatgccgcaactttcgccggtttttcaaccatatcgcataccatccaggagatattgctgcgcgtcggacggaatttgaaaccgtcttcccgcagccacgtcacctgtccggtatccatcagactttgcgccatcgggccgttgtcgacggaataaacccacatgttgcgcttcaccagttggtaggtccagccgccagggcaagcgcctaaatccaccgcccacatcccgttcgccaggcgttcatcccactcatccgcaggaataaacacatgaaatgcctcttccagtttgagcgtggaacgactcggcgcatctgccggaaatttcaggcgcggaatgcccatatagaacgggctattattgttgctgtaactgtaaccggtatagcagcagcctggtgcaataaagaatacatgcacaaccggacgcttcggcgtttcatagttcgccagcaccccggcatcgcgcaaggcagcgcgtagcggaacagtaaatttacggcagaatttcagtaactctttgctttcgttggtatcggcaacttcaacacgcagttcaccgcccttctctactacgccctgtaacatgccgacaatgggggtaatacgatcttctggcggcaaatgctgcaggagttcccccaccacaaaccactggcgggcaaaaattaaactactgaacggcagctcacggattaacttatcgccatcatcaggttgataacattcataaatgacataacccgcattctctttcacgcgggcaaaaccgaaaatttcccgctggccggctttatcggtaatttctgcggcgcactctttttcaaagcccggacggcacagcaatacaaccttattcatgacttacgcccttgcgctttaaacggatagcaccaactaacattaacgcccagcccgcgaggaagctcacgccgccaaccggagtgacaaacgcccacaaacgcagatgggacagcgccaggcaataaaggctgccgctgaacaacaccgtgcctaacgcgaggaaaacgctactccagtaaaaccagatactgatgcgacgctgcattgccaccgccagacctaagatcgccagcgtatgaaacgcctggtattcgaggccggtctggatccagcccatctcaacggcccccatggttttacttaacacatgcgcgccaaaagcgcccagagccacaaaaatgaagccgctaatggcggcgaaaatcagcataaaacggctggtcatggtcgtaccctacgtaaattattgttcataacgaaagcggaatttttcttgttcagcagcggctttcgccaggatccattggcgaaaggcggctattttacccagttctgcctgactgtcatgacaaaccagataaaaagcatttttactgaccagaacatcattaaacgggcaaacaagacgtccggcctcgatttcagattgcgccatcacgttatttgccagcgccactccctgcccgtggatagccgcttgcagcaccatggcgctatggctaaaaattggcccttgctgaacgttgatatgatttaaccccaactgtcgggtatatgtctgccagtcacggcggctagcatcatgtaataacgtatgtttagccagatcttccggtgtcttcaagggtttttcgccagtcagcagtagcgggctacacaccggcaataaatattcggcgtacagtttttccacccgtagccccggccagttgccccgaccataaaatatcgccacatcaacatcatccgccagcttatcttcctgacgatcaaccgcctggattcgaacgtcaattcccggataagcactattaaagctggaaagtcgcggaaccaaccaatgaatggcgaaactggggagtaaactgaccgtcaacgcccccttggcgctacgggcctggagtttacgcgtcgcttcggttaattggctaaatatctctttgatatcgaggaaatagctttgcccttcctcggtcagcaggagactacgattacggcggcggaacagttttagccccaaaaaatcctcaagagacttgatttgatgacttactgcggcttgggtcacaaaaagctcttctgctgcgcgagtgaaacttaaatggcgtgctgcggcatcaaaaactcgtaaggcatttagcggtggtaatcgtttagacatggctattaaactttgatgttaaatgaatttaacaattagatcacactatgtaacctattagtttttttaatctgagccattataaattgtccgttgagcttctaccagcaaatacctatagtggcggcacttcctgagccggaacgaaaagttttatcggaatgcgtgttctggtgaacttttggcttacggttgtgatgttgtgttgttgtgtttgcaattggtctgcgattcagaccatggtagcaaagctaccttttttcacttcctgtacatttaccctgtctgtccatagtgattaatgtagcaccgcctaattgcggtgcttttttttaccttgcgatcgcgaattactgatccagttcgaccatctctttcacgtcagtacggttgatctgctgtttgttgccattagcgtctttatagctaatcataccggtatcgttatcagtctgtggtttgccgtcagagacgatggtacgtccgtcattggtgtgcatcacatagttgctaccggaacaggcgctcagggcaaaagtcagcatacaggcagaaataattgcggcagtctttttcatcatcttctccttaaagcgattaataaatcttaatagtattgattaacaggctaaaattaacgcctaacactattcagcatatgttacttacgcggcttcgccaggatatccagataattctgatggttagcactctccttgtatcaaagtgaattttgcgtcacgatcggtgcatcaagccgaggagtaccatgaacgtttttaatcccgcgcagtttcgcgcccagtttcccgcactacaggatgcgggcgtctatctcgacagcgccgcgaccgcgcttaaacctgaagccgtggttgaagccacccaacagttttacagtctgagcgccggaaacgtccatcgcagccagtttgccgaagcccaacgcctgaccgcgcgttatgaagctgcacgagagaaagtggcgcaattactgaatgcaccggatgataaaactatcgtctggacgcgcggcaccactgaatccatcaacatggtggcacaatgctatgcgcgtccgcgtctgcaaccgggcgatgagattattgtcagcgtggcagaacaccacgccaacctcgtcccctggctgatggtcgcccaacaaactggagccaaagtggtgaaattgccgcttaatgcgcagcgactgccggatgtcgatttgttgccagaactgattactccccgtagtcggattctggcgttgggtcagatgagcaacgttactggcggttgcccggatctggcgcgagcgattacctttgctcatagtgccgggatggtggtgatggttgatggtgctcagggggcagtgcatttccccgcggatgttcagcaactggatattgatttctatgcttttagtggtcacaaactgtatggcccgacaggtatcggcgtgctgtatggtaaaagtgaactgctggaggcgatgagcccctggctgggcggcggcaaaatggttcacgaagtgagttttgacggcttcacgactcaatctgcgccgtggaaactggaagctggaacgccaaatgtcgctggtgtcataggattaagcgcggcgctggaatggctggcagattacgatatcaaccaggccgaaagctggagccgtagcttagcaacgctggcggaagatgcgctggcgaaacgtcccggctttcgtagtttccgctgccaggattccagcctgctggcctttgattttgctggcgttcatcatagcgatatggtgacgctgctggcggagtacggtattgccctgcgggccgggcagcattgcgctcagccgctactggcagaattaggcgtaaccggcacactgcgcgcctcttttgcgccatataatacaaagagtgatgtggatgcgctggtgaatgccgttgaccgcgcgctggaattattggtggattaatgacaaacccgcaattcgccggacatccgttcggcacaaccgtaaccgcagaaacgttacgcaataccttcgcaccgttgacgcaatgggaagataaatatcgccagttgatcatgctggggaaacagcttccggcattgccagacgagttaaaagcgcaggctaaagagattgccggatgcgaaaaccgcgtctggctgggatatacagtggctgaaaacggcaaaatgcatttctttggcgacagcgaagggcgcattgtgcgcggcctgctggcggtgttgttgactgccgttgaggggaaaaccgccgccgagttgcaggcacagagtccactggcattgtttgatgagctgggattacgtgcgcagcttagcgccagtcgcagccaggggttaaatgcgttaagcgaggcgattatcgctgcgacgaagcaggtttaagcacagaaccgggtcggataagacgttcgcgtctcatccgacctgattgtttaaccctgacgcgccgctttcgccatcatcttcttcagcgcatgagaaaccgcaacaaacccaaaggtggcggtcaccatcgttgccgcgccaaatccagatgcacaatccatccgcttcggcccttctgccgtggctttcatcgcacacaccgtaccgtcactctgcgggtacaccagcgcttcagtagaaaacacgcaatccacgccgagcttacctttactgtttttcactacgccaaaatcgcttttcaggcgctcgcgcaacttcgccgccagcgggtcctgaatcgttttcgccagatcggtaacctgaatctgcgtcggatcaatctgcccacccgcgccaccggttgtgaccagtgggattttattgcgccgacaataagcaatcagcgccgctttgggccgtacactatcaatggcatcaatcacgtagctataacccacgctcatatactgcgctacgttatccggcgtcacgaaatcatccaccaccgttacacggcactccgggttaatctggcgaatacgctccgccataacttccgcttttgccagcccaacgttatcgcgcagggcatgaatttgccgattggtattggtgacgcacacatcatccatatcgataagcgtgattgcgccaatccccgtgcgcgccagcgcttccgccgcccaggaaccgacaccaccgataccaaccacacaaatatgcgcgtcagcaaacagttgcaacgctttttcaccatacagacgcgctgtgccaccaaaacgctgacgccatgcatcactaattaccacagacatagcacctcagaattaaaaagggcgaggttatccctcaccctaaacgcataaatgcctgatgcgctacgcttatcaggcctacataactcctgcaatattttggatttgcatgatttgtaggccggataaggcgttcacgccgcatccggcatgaacaacgcgcacttagtcaataatcaggatgtgaggttacccctcaccctgtcatatccgtaaaaacggcatacagaatatcacatcagccgctaaagacgttacctgcgcccggggcggttttcagcacccagacacgtccatagtggttgtaccaacctgcgcggtgtccggcttccggcccgatcccttgatagatatcgaagtgttggcctttgattgcaccaccgacatccagcgccaccatcagacgcagttcgtactgaccattaaatttgccgttattatccagcaacggcacttctgccagcaaggtagtacctggcggaataatggaacgatcagaggcaacactcgcgcgaccaaccagcggcaccgcacttgcccctttcaccggagcaaaagattgcggtttaaagaagacgaaagacgggttctgttccagcagctcgcgaacctcggcttcactgtgtgtttcgccccagtgacgaatcgcctgcatgctcatatcttcttttttcacttcgccacggtcgatcagcaccttaccaatgctgcgataggcatgaccgtttttccctgcatagctgaaaaagttaagcggactgccatcaccaaagtcgatatacccactaccctgcacatccataatgaagttatccatcagggagttactgtaagcgagaatatatttatcactcaatgcccccgcgtagatctccgcacgagacggcagacgaccacgttttggcggcatacggtaaataggatactggaactcgccctggcgggtatggcgcgcctgaattaccggcgtgtaataaccggtaaactgcacgttaccatagttgtcggcaccttccatctgccaggcatcaatgccgaactggcgcatattgcgggtatcaccgcctgcgcgcagccactcttgcaccgcgttataaacattactctggttgccatacagacgcggactgctattacggatatggttaatttgctcggcaaaatcaccggcgttaatcggcgcgccaacggcatctggctggttcaccagagagaaaggctgggtaaatttcccgtctttatattgctgtccgcgatcggttggtttggaagagcaggcggcaagcattgccacaaccgtgcccataagaaggtactttacccaacgtcctttcattgttctcttcttcaggttaaaaaataaggcgcaacgaagataacaaaccgccgcgtttaatgaaatgagcagcctctccctgacgcaaattttgcacaaaaaataggctttagtgatttgtttttgttcaaaatcatgccaaatccgtgatcggggtaaaaaaaaggttgcatgaaaacgcgagcggagtatagtgcgcatccacggacgcggggtggagcagcctggtagctcgtcgggctcataacccgaaggtcgtcggttcaaatccggcccccgcaaccaattaaaatttgatgaagtaaagcagtacggtgacgcggggtggagcagcctggtagctcgtcgggctcataacccgaaggtcgtcggttcaaatccggcccccgcaaccaatcaaatttgatgaagtaaaagcagtacggtgacgcggggtggagcagcctggtagctcgtcgggctcataacccgaaggtcgtcggttcaaatccggcccccgcaaccaattattgaacaccctaacgggtgtttttttgtttctggtctcccataaaaaagcgccattcagcgcctttttatcatccccttctcgccagcgtcgccccatcggcaaaatacgctttaatccccgcaagaatagactccgcaacttcctgctggaaagtcgccgttttcagtttacgctcttcctcaacgttactgataaacgccgtttcgaccagaatggagggaatatctggtgcctttagtacggcaaacccggcctgttcaacttgatttttatgcagcttattgattttaccgagcttattcagtaccgctttaccaaacttcaggctgtcggcaatggtcaggctctgtaccatatcgaacatggtgtggtcgacatagcggtcaccgcttttgctcacgccaccaatcaagtcgctggcgttctgggtttgtgccagatattttgccgcagtactggttgcacctttggtactgagcgcaaacacagaggaaccgctcggctgacgactggtaaaggcgtcggcatggatagagacaaacaggtcagcacgctgtttctgggcttttgctacgcgcacttgcaatggaatgaagatgtcttcattgcgcgtcatgtacaccttcatattgccctctttctcgatcagagagcgcaaacggcgagctatttgcaataccacatctttttcgcgcgttttgtatttccccaccgcaccggagtcttcgccaccgtggccagggtcaagcataatgacaatcggacgatcgcgccctgctttacccggttgtggaccactttgcgctggcggcacctgcttttcgaggtcgcctttgttgtaatcctccagcagcgccagcagcgggtcctgcatatcctgtgcattggccggatagaggtccatcaccagacgctctttaaacccggcgaccggcgcaagggcaaacagctgcggttttacgttttgctttaattcaaaaaccatccgtacggtttgcgggtcaaattgcccgacgcgcgcgctcttgatgaacgggtcgtctgcacgaatttgtgccgccatccccttgagtacgctgttcaggtttacatcttcgatatccaccaccacgcgttcagggttactcaacgcgaactgcttatatttcagctgacgattactttccaccgtcacgcgggtgtagctggacgcaggccagacgcgcaccgccacgacctggctgaccgcagccagactgacctgacttacgctcaatagccacatggcacccgcgccttgcagtaaacgacgacggctgattgcagtgttggatccactcatgcctctcccgagcaaaagaaatctaagctgtgtaacaagtaaacgactaatttgaccggaaactttagcgaaagacgcataatctgtcatctaataaacggtaaacattctttttatattcacggcattactgataaaaaagtcgctctcgcataaaatttacacttgcaccctgcgaaaaaacagaataaaaatacactaatttcgaataatcatgcaaagaggtgtgccgtggtaaaggaacgtaaaaccgagttggtcgagggattccgccatagcgttccctatatcaatacccaccggggaaaaacgtttgtcatcatgctcggcggtgaagccattgagcatgagaatttctccagtatcgttaatgatatcgggttgttgcacagcctcggcatccgtctggtggtggtctatggcgcacgtccgcagatcgacgcaaatctggctgcgcatcaccacgaaccgctgtatcacaagaatatacgtgtgaccgacgccaaaacactggaactggtgaagcaggctgcgggaacattgcaactggatattactgctcgcctgagcatgagtctcaataacacgccgctgcagggcgcgcatatcaacgtcgtcagtggcaattttattattgcccagccgctgggcgtcgatgacggcgtggattactgccatagcgggcgtatccggcggattgatgaagacgcgatccatcgtcaactggacagcggtgcaatagtgctaatggggccggtcgctgttagtgtcactggcgagagctttaacctgaccagcgaagagattgccactcaactggccatcaaactgaaagctgaaaagatgattggtttttgctcttcccagggcgtcactaatgacgacggtgatattgtctccgaacttttccctaacgaagcgcaagcgcgggtagaagcccaggaagagaaaggcgattacaactccggtacggtgcgctttttgcgtggcgcagtgaaagcctgccgcagcggcgtgcgtcgctgtcatttaatcagttatcaggaagatggcgcgctgttgcaagagttgttcagtcgcgacggtatcggtacgcagattgtgatggaaagcgccgagcagattcgtcgcgcaacaatcaacgatattggcggtattctggagttgattcgcccactggagcagcaaggtattctggtacgccgttctcgcgagcagctggagatggaaatcgacaaattcaccattattcagcgcgataacacgactattgcctgcgccgcgctctatccgttcccggaagagaagattggggaaatggcctgtgtggcagttcacccggattaccgcagtagtagtaggggtgaagttctgctggaacgcattgccgctcaggcgaagcagagcggcttaagcaaattgtttgtgctgaccacgcgcagtattcactggttccaggaacgtggatttaccccagtggatattgatttactgcccgagagcaaaaagcagttgtacaactaccagcgtaaatccaaagtgttgatggcggatttagggtaagcgatgaaaatcgtcggatgcgacatgcgtaacactcgtacgtcgcatccggcaattacgtttattcccgactactaaacaacgccgccagaccactgcgccgctcagtacgagtggcgattgccgcacttaatatgcgctcatcggcatacaggctcagacggcgacgcgcgcgggtcaccgcggtataaaccagctctcgcgttactaccggcgtgcgttggctcggcaaaatcaacgccgcatggtcgaactcgcttccctggcttttatgtaccgtcatcgcccacgtagtttcgtgctctggcaagcgactcggttgcacagacttaatattgccgtccggcatcgcaaaccagacgcgcgtcccctgcccgcgatccagcgcaataccgatatcgccattaaacaacccaagcgcgctgtcattacgggcaatcatcaccggtcgaccttcgtaccaacgagagtgcggatgacgatgaattttgcgcttctgttgcataaactgctcaattcgctcattcagtccagccacgccaaacggcccttcccgcagggcgcacaaaagctggtactcattgaacgcctgaatgattaaatccggctcggcacgcgcttgcagcagatccagataacgtccgtaacccgcaagagcttcctcaagcatcgcaatataatcttcgccgctctgtaaaagccgtttttcgatatcagtaaaatcctgctgaaaaacggttttcactgccgttttatcaccacggttgatcgccgcagctaactgaccaatgccagaatcgctgccgaaacgatagcttttttgcagcaggcagagactgtcgcgcaaagatgccgcttctgtgccggttcctgccggaacgtgagtccccgtcaggcggcttagctgcctggcacgctcggcggtaaagcccgcgttggcataagcgcagatatcgcccagcacagccccagcctcaacgctggccagttgatcacgatcgccgagaaagatcactcgcgcatgatcgggcaaggcgtcgatcagtctgctcatcataggcagatcgatcatactcgcttcatctaccaccagcacatcaagatgcagcgggttaccggcatgatgacgtaaacgctggctacccggctgcgcgcccagcaatcggtgcaaagtgctggtatcttccggaatgcgtttcttttgttcatcggtcagcggtaactgtcgcaaagccttgccgagagattcggttaagcgcgcggcagctttacccgttggtgcagccagacggatacggcagcgttcgccgtcggccatttgaattaacgctgccagcaacttcgctacggtggtcgttttaccggtgccagggccgccggaaatcacgctgatccgccgcgtcagcgccactgccgccgcaactttttgccagttaatttcatcgcttactggaaaaagtttgtccagggtttgcgccagtagagcttcatcaacctcaatggcatgattcacttcgttgaaaaagcgtgccactgtgcgctcgttacaccacatgcgattcaaataaagacgatcgccacagaggatcatcggcgtgggttcatctcccctgctgaccgcttgagaagccagcaagcattcttcccaattttgtagctcaccgatttcactgacacaggtcgccaacagcggatggctcgcctcgttattttccagtcgactaagcggcaaacaaacgtgtccctctccggcatcatgacttaacagtgccgccgcgagggtgacggcaggatgttcatctcccgccacggtcagggcaaattgcacatccagcgggcgtagctgtttgtgctccacagcttccagtaattgcttttgcaatttcattacgcctcctccagggtcataccggcaaacatctcatccatcagggcaatcaacccggcgttgggtcgggttgtgtaaatcccctgttgcggatgttctttatcaacgccacgcaggaacagataaataacgccgccaaagtggtgctcatagtcgtaatcagcaatgcgatggcgcagataacgatgcagcgccagggtataaagctgatattgcagatcatagcggtgtgcctgcattgccgctgccatagcctgttgggtgtaagcgctactgtcttcacccaaccagttggatttatagtcgagcaggtaataacgcccttcgtggcggaacaccaggtcgataaagccttttaacatgccacgtacctgcatgaactccagcggcgggcagcctgcggatagcgggtcaaactggcggattaacgtatcaagctgactggcgataagcggttcactaatcggcagataaaactccatctccacctgtttattgcgggcggaaagttgactcaggcttacgccggtttcattgagaggtgcctggaggacagccgtgatccactcggtcaataccggttcccactggctttcaaagccgccgagttccagtttttcccgcacccagttcgggtcaaccggctgggtaaaatccaggtcttcaaacaaactgtgcaagaacgtccccggactcgcaccgcgcggaaactgatgtggtgttaacgtcggttcttcaacgacgctggcaacgcctgcagcatcgacatccagccgaggcatcaaatcctgggcgataccgtgaccacgctgttgcaaaccagagtagctggtgacgcgccagttatcgccgggcaatcgttgtaacgtcttcgcattcagctctgctgtagaaacatcattaacctgccagggttggttatcaccagtttgtgccgtttgccaggcaatatcatcatcgcataacgcttcaatacaggtgcgaagccctgccgcatcttgcggttcccctttttgcagcaaacgcccgagcgcactttggtggacgtcggtgtcaccttttttatcgccacgacggcgcaccagcggtgcaacgccgagactgcaatgccaaacgctacgtgtcagcgccacgtaaagcaaacgcagatcttccgccagacgttcggcctccgcgaggtcgacgctttctggcgcagcattaagatccagaactgcctcaaagctgtggcgatcgtgataaaacgcctgctcctggacgcggaaattggtgataaacggcagccagaccaatggatattccagccctttgcttttgtggatcgtgacaatctgcaccagatgtttatcactttcgagacgcatttgttggctggaggcattactgtctggctcgaggatatgttggcttaaccagcgtaccagcgcatgttcactttccagctgcgttccggcttcttgtagcagttcgctgatatgcaagatatcggtaagacgccgctcaccgcctgccgttgccagcaagttttcagcaatgttacgcgcgctcatcagcgcccgcagcatcggcataacgccacgtttgcgccagatttgccgataaccatcgaactcttcgactaccacatcccacgcatgttcgtcattgttcagcgtttcgatatccagcgcgttcagccccatcatactcgttgccagcgcactacgcagggtgttctcacgttcgggcgtcatcaccgcctgcaacaaccaaagcatttcctgcgcttccagagtttcaaaaacactgtcgcggttgctaaggtaaacggaagggatttccagcaacgttaaggcatcgcgcacctgggcggcctcctggcggctgcgcaccagcacactgatgtcgctagcacgcaccggacgcgcgtcgtcgccgttcatcagcaacgcttcgccccgctgtccggcttgtagccagtcgcggatttgcgcagcacatacctgcgccatggtactttgataatcgccaacgccgcagctttcgccttccatcagccacattttcatcgcaggctgtgtttcacctttaaatacaaaacgtaacgcctgatttttcccggcacttttcactggaataaacggtatttcgcgaaacatgaacgcgtcatcagtctggctgaaaagcttattcacgctgttcaccattcctggtgcggaacgccagttggtgtctaaagtgtagtgggcgtgaacttcgctacgcgccttcatataagtgaagatatccgcaccccggaatgcatatatggcctgcttcgggtcgccaattagcaacaatgcggtttccggctgatggtgccagatacggcgaaaaattcggtactgctgggggtcggtatcctgaaattcatcgatcattgccaccgggaatcgcgtacggatcgccgctgccaacacctcaccgctttcgctacgcagcgcggaatcgagccgacttaacatgtcatcaaaacccaattcgccacggcggcgtttttcacgcgctactgtttcgcggatctcagccaatgcgcgggtgatcaccagatcgcggatgctcaatggttctgcaagcagttgatcgatcgcctcaaacagtggatgtcgcggggtttcccccccggccttcgtgcgatcttctaagaaacgctgggagaatttttccaggctctccggcaactgataactgtttgtctcttcttctgcccaggcgctgatcttgtcgatccatttagcctgattgctacggttaaacttgcgtcgatcaataccagaagattcgatcagcgcatccagttcacccactgcgtcgcgccactgctgttttaccgtatcaatacgcgccacaatttgcgcgtgacgggaagccagcgtttcatcatcgggcggcggtgctttgataaccggcgcttcgccttgcagataacgattaatatcgcgcagcaacgcctgcggccctttccaggtttcaaagacgacctgggctatttcacgcggcagcgggtagcagtggcgacgccagaaatcggcgcaggcctggtagcgtagcagagactcatcttcaatcagctgctgctcaaacagcatgccggattcaaaggcattcaggttgagcatgcgctggcaaaagccgtgaatagtaaagactgccgcttcatccatctgccgttcggctaacaacaaccactgcgcggcttgcgctttatcgtcgatctcttccagcaggcgttcgtacagtggattgtcggtggtttcacgcagacaggcgatgcgcaactcgtggatattgctacggatacgaccgcgcaattctgccgtggcagcctcggtaaaggtgaccaccagcagttcttcaacggtcagcgggcggggaaaggcggcggaaccgcctagtccaagtaacaggcgcaaatagagcgccgcaatcgtaaaggttttgcctgtgccggcagaggcttcaatcaggcgctcaccctgtaagggcaagcgcaaaggatctagtgtctcggcgacatcactcattcttttcactcatcaggggcattgtttgctgcaacgcgctgacgttctcccacactttccagccttcagggtgtacatattcggctttcccgttctggctgccggaaatctggctcagaatagccatgccttgcggctcgaccaccgcctgatggaagaaatcagcaagtttttgcggcgtcagcagttttatctgggccacgattttatcacggctatcgaagcgcatattgccgcgatcgaaatctttacttaacttgcttgcttcttcgccgagcgtttgcggtgcctgcagcatctgggtaattaccgcctgctggatttgcgcaaactcatctggcttcatcgctcgcaattttgcctctgcggttgggaaaaacgccttgtaacgctcccacaagaaactaggctgtttatcattgctttgcaaaaggaagcccatgccccactgacgccccacgctcattggaaacgcaaacacggcatagcccaattgttcttcggtacgcaactgattgtagaaccacggctgtacgatctgccccaacagagagctataggcactgctggtgtattcatcgtagccagtcggtacaaataccgctgccagtgcggagtcggtgctgttaccggctttttcaaagatgacggattgttttttatcgaccactacatctttgtttcgacaccactcactaccatcagcgcccaactgtttttgcacatcgcgtgccagcgttgttgcctgggcctcggtcatgttgccgataaccataaactctggtcgagccccactttttaaggcgtcgcgataggccagcacctctttcaacgtaatggagggcaaaattttacgccgttcatctcggctgaagtacggcacttggctgagcatctgcgcgggcataatcgcctgctcaaacgctttacccttttctgcggaatccatcatctggttataccaggacttcgcctgctcaagctgatcttccgtagcggtatagctaaagtacccctcgagcaatgcctggaacagctgcggcagacgctgggtgtaaccattagcattaaccataaggccgttgttagcgttggtggaaaaacttatgccaccaacgctcgcctggttgcttaactgatcaagcgccagccctgcgagataatcattgagcgcaaacatcacctgattgcgggcgctgtccatggctttcggattacgcaaaatcaggctgacatcagctttgggctcgctggcaaaataacggcttggcgcatacaccacgcgcagattgctctcatcaacaatcagctctggatggtcgtatttcttctcactcttaatcaggctgaaatcatcaggaatataagggttaagctctggcaaagagagcgcaatgtcggcggcttttttctgccagtcggcgaaagtttgtgcgctgattttatcgacctgatacggcgcatcgacaaagtaagccgttttgttgtgcggctctttcgggctgatataccagatacgcgcattctgcggcgtcatcatcgccagacgttcctttactgctttagcatcgtaccgatcggcaatattgactgcatccagcgtatgctcaacaggaacgcgaatcatggtatctgccagccattcgacgtaatccatatcacgggtgatgctcggataacggaagtcgatatccagcacattcgccagttcatcgaagtattgtttatcaatgcctttttcacgtaacagattgagatagctaaaaattgccgccacaacctgatcgcgattagccaggcctttatcggttaaagacgcagagatcgctaatacgccgctgttgccgttgacgataggatcggagttggcgctaatgccctcaactaatccctgcttttgcagccagtcagaaagtgtacctgggctgcgattgccaatcagataggtaatcaattcatcggttttactacggaacttcgcactgttgttatcgatgcgaaactcaacgcgcaacactttacgcggcagcgcagggacgtaatgaatgataatgcccttttgcgcgtcggtgactaccggcacggtgatttccggttttttgctctctttgttcggcacgcgaccaaaggtgtccgccgccatttttgccaactccggcagcggtttattactgtaaataaccgccttcatcaaattggcggaatagtacttctcgtggaaatctttcagcgcctgctgcaccggattaccaggtttgtcgcttaaagtttcgaggttaccaccagaaaacttactaccggggtgtgccgggttaatggtttctgcgctgacctgtgccatgcgcatcccgtcacgcgtacgcgccatggttaattcagcgttcaccgcattacgctcacgttcggcatatttcttgtcgagcaaaggttcagcaatagcatcggccaggcggtctaccgcaccaggcaaggcgtcgttctcaacttccagatagaaagccgtgcgatacggcgcagtgctggcattgtgactaccgccgtgcattttgagatattcggccagactgtcagcctgcgggtactttttgctccccatcagactcatatgttcaaggtaatgtgccagcccctggtacgcctcgggatcttccaggctcccaacgggcaccaccagcgcgctgaggcttttaactgcctgcggatcagaaaccagcaagaccaccataccgttatccagacgtatagcctgatactggcggttatctttatcacttttacggatggtttcctgaatcggctgccatcccgtttctgcctgacttaagggtgcccaaagggcaactaacaacaataatgctttgaaccaggtgctgcggggcattcacggacctcataatcaacttaattttctgtccagattcaacacgttaacgcaaatcatctgccagaatttaatcttgtgctgcacgagtcagcctatgtttatataaccatcagtccgtgactggtgcgcatcataaagtaagcggatagattgcgcaatttttatacagcactcaactctgattaaagcgaaacagcggtaacaggaaacgttggctctgttcaacgatggcctccattgtctctggtgttaattgccgccagagcctttgataccagatatcatcaccttcgccacgcaccatcatgttgccttcgtaagcctgaaggaatttcgtacgggctttttgcaacgtggaatcgtcatccagcatggcatcgttttgcgcgtcataacaggtttttagccacgcgccgccactttcaggtaacaccagcaatggcgcggacattccttcacgatacccctcaatcagttgactgaggtaatgcaaagcctgttcggctgcaagcggcggaaaacgccactcgccgtctttgcgtagaaaaaggcgactttcaccattaccaccgctggcacagtagacaaggtgttccagccaaagttgcattccctgggccacacttaataaagagggacgccagcgcaacaggccatccggctgcacctgcggcaaccagccagttatctgcacaccgttgcaggcgagatcaatttccatactctgccccggctggcgacaggcaatgactctgtcggcaagctgctgcatctcctggcactgtgtttcccagaaaatttcaccaaaagcgccatacggtaaatcccctgccgctcggaagcggcggaacaagcgttcggcatcatcctgctcaaccagtgcattcaataactgctgattgatttgataacggctaagtccttccagaataaatggctcggtgtcggggatttcgctgtcttcagtacggaagttcacctgcaaacgcatctggaaaaatgcccgcaccggatgtgcccagaatcgttgtagcgtttccagcggcacggtttccggtaaggtaaacggcagcggctgaacaaattcagaatgtgctttaccagcctggctggccgcaggtagccattcacgagcatagctttgtcgttcgcctggctggtagttttgtggatcaaacggcatccgggtatggaggcaagtaagatgcgcttttacccttgcctcgctttcatcacagttgagcgcttcatcgcccggtagataatgactttgcccgatgtagtcgatcagttcctgcaccagtacgctcgggaaacgctcactgttatcctgaatggaacgaccgatatagctgatatagagtttttgctgcgcggaaattaacgcttccaggaacagatagcggtcgtcatcgcgacggctacggtcgccacgcttcggtttctggctcatcaggtcaaagcccaatggcgcaagctgacgtggataaacgccgtcgttcattcccagcaggcaaaccactttgaacggaatactacgcattggcatcagagtacaaatgttaaccggtccggcgagaaaacgctggctgatacgttcttgatccagacgctgtgccagttcatcacgcaatagactcagcggcaccgcgtcgccatactgcgcacctaaaccttcggcgataatcgcctgccattgttgttcgatcagcgtcatcgccgcttcggtttccgcatccggcaggaagaaggcgttgagcatatcgcgacaaaccggcaaccactcttccagcggacgctcctgtgccagcccgcgacgccagatgtttagctgcattagcagactagccagatgccccaccagttctgcaattaagccgctgctttcatcataaggtagaacgctttgccactcgccctgcgcgctctccatcgcgtagcccaacaacatacgcgtcaggccaaatcgccaggtgtgttgtccggtggcggggagttccagctcgcgaacgttgtcgtcatctatgccccaacgaatgccggattcgttgacccactggcgtaaataacgcagcccttcttcggtgatgtcaaaccgcgccgccagcaccggcacatccagcaacgccagcacatcctcactcacaaaacgactgtcaggcagacttaacaggctgataaacgcttccagtaccggatgactctgccgcgcacgacggtcggaaatggcgtaaggtaggtaacgatccgcaggtgcgctaccaaacacagcctgaataaacggactgtagctgtcgatatcagccaccatcacgatgatgtcgcgcggagtaagtgtcgggtcttcctccagcatcgccagcaggcgatcgtgtaaaacttcaacttcacgctgcgggctatggcaaacgtggaaggtgatactgctatccagtggatcaagcgggcgtttgttatcgctacgggaaaactcttcgatgttcacaccagcaacggcgcggttttccagttccagaatgtcagactgaatgttatgcagcaggttatctggcgtgacatcgacaaaggcgtccagctcctggctgctctccaggtcagaaaggagataaatgtagtcgcgcccaagcttaccccaactagccagcagcgggttgccgacatcctgttcaccatcgctgttaaagagctgcccggcattttcgctatcacgaaatagcggcaattcgcgatcttcaaaactgtgtcgacgctgacgggtcagcagtttcgccagataagcaggatctttaatatcgccccagtaataacggcaggggttggtaaacaggagatggatttcaatatgtttacccagcgcctgtagcgcctggagataaacaggcggtaacgcggaaataccgcatataaagacgcggctaggtaaccccggcgggcaggtcgtcgcggactccagcgtttcgataaagcgctgatagagattggcgcggtgccagcgcggttgcccgagttgatgggtatattccaccagcgccttccacaacggggcttgccaggcctgtgcttctcccagcccttcaaccaaatgtcctgtttcccactgtgccagccagtccggacgatagaccagatactggtcaaacaggtccgccgctttactggaaagctggaacagttttcgcttgtcgctatcgtcagtcagataatgccgcaacagggtaaagtcttcgcgctccagcaattgcggcagcagagtcatcagtttccagctcatgctctgtttgttaaaggcgctctctttggggatttccggtaacacccggacgaacatatcccagataaagctcgctggcagcggaaaatcaatgtttgccgcaataccaaacttttggctcagggtcatttgcagccactgtgccataccggtactttgcaccagaatcatctctggttcgaaaggatcgtccagccgttcgcgttcgacaataaactccatcaacgcttccagcacgtccagacgattggaatggtagacccttaacatagcggctcctgattactgacgattcgggcaatgcaggcgggtcatctcgccttctctgcccccgggactaactagcgtaacgctgatgctgacacatcccgcctggcttgtctgcattcggttgacctgccagttggcaggtgggctaatcgcgcgcagttgcgtttgctgccagccatgccgccagagctgttggtactggtttctgctggcaagactgttcattaatgttcgctggaaaccgcttaacgcagtgacaatcatcaccatcaacaccatcgccaacattacctccggcaggctaaagccttgttgattcttcagggaagcactcataacgccctctctttcagcggttaaatcagggaagctgacataacgccctctctttcagcggacaaaaatcgctccagccgcgtgggctaaaaacaatgtttccatcaatgacttcgcctgttcgccacaagctaacgccttcataaccggcaatcaataaggcttcattatctgccagtaaacgcaaacaaacctgggcatcggtttcagcgtactggctgcactgaactgctggctgcgtctgccagcagtgcatttttccccacgccagcgcgctctgaacgatggcctggcggcgcaaactctgactttccatgctcacgcgagaggcaaaactgcgatcctgttggctcattccttgtaatagcaaactacccaaaaccagcagcatcaggaccagagccagactgctaacacccttttcgcggttcacaggttgaatcctgtcacgctatagctggcattcaccacggtttgcggttcagacttactggcagcacgcatattaaccgtcaacaccgggctgaagccgctgacatcctgacgtacgacctgaaaagtgtcgataatgatggcatccggattagtgactttatcccagcccttaccttcacaggatgtcgcaccgcgtagcgtttccagcacatgctccttcagacgaaatccaatctggtcggactcttttaccggttcgcgatcccagataccgttactgttcgcatcccactgcacaatgacacagtcaccctgtccgacaatttccagcccttcgccggtacagatgccatgacaataacccgccctctggagatgcttcgcgacggtaaatacccgcagccagatttcatcttccagcgccagcttacgggtgctcgttaaactttcacgctgtaacgcaggcagaaagcgtgccgcccccagcaacaatacgccactgatcgccatagcaatcaacacttccagcagagaaaaaccttgctcttttacaggcatccttctgtttctccttgctgacaaagccggagtcttccccacgggctaaccaccagccaccactcgcccgtactgtttttgaagcgaatatgcccggcccatgcggtattgcgcaggccaaagaaagcaaggctaggtgtcaggtcgctcatttcgacttcgggccagcgtggcacaaagaccaatggactactgccatgacaggtattggccccagcagcggaactcacaaggcaccataacgtcccctccctgataacgctgatactgtggtcgcggttatgccagttggcatcttcacgtaaatagagcaaatagtcccgcgcctggctggcggtttgccatagccgttggctctgctgccagtattgccagccatagagtccacttgcgcttagcatgaccaaaatcagcatcgcgaccagcgtttcaatcagcgtataaccacgttgtgttttcatgccggcagtatggagcgaggagaaaaaaagacgagggccagtttctatttcttcggcgcatcttccggactatttacgccgttgcaggacgttgcaaaatttcgggaaggcgtctcgaagaatttaacggagggtaaaaaaaccgacgcacactggcgtcggctctggcaggatgtttcgtaattagatagccaccggcgctttaatgcccggatgcggatcgtagccttcaatctcaaagtcttcgaaacggtagtcgaagatggattcgggtttacgtttgataatcaacttcggcagcggacgcggttcgcggcttaattgcagatgagtttgatccatatggttgctgtacagatgcgtgtcgccaccggtccagacaaaatcacccacttccagatcgcactgctgcgccatcatatgcaccaataacgcgtagctggcaatgttgaacggcaggccgaggaagacgtcacaggagcgctgataaagctggcaagagagtttgccgtctgccacatagaactggaagaatgcatggcacggtgccagcgccattttatccagttcgcctacgttccacgcactaacaataatgcggcggctatccgggtcgtttttcagctggttcagtaccgtagtgatctggtcaatatgacgaccatctggcgttggccaggcgcgccactgtttaccatacactggcccgaggtcgccgttttcatcggcccattcgtcccagatggtgacattgttttcgtgtagataagcaatgttagtgtcgccctgcagaaaccacagcagttcatggatgatggaacgcaggtggcaacgtttagttgtcaccagcgggaatccatcttgcaggttaaaacgcatctgatgaccaaaaatggaaagcgttccggttccggtacggtcgtttttctgtgtgccttcgtcgagcactttttgcatcagttctaaatactgtttcatggttcctcaggaaacgtgttgctgtgggctgcgacgatatgcccagaccatcatgatcacacccgcgacaatcatcgggatggaaagaatttgccccatgctgatgtactgcacccaggcaccggtaaactgcgcgtcgggctggcggaaaaactcaacaatgatgcgaaacgcgccgtaaccaatcaggaacaaaccactgacagctcccattgggcgtggtttacgaatatacaggttgaggataataaacagcaccacaccttccagcagcagctcgtaaagctgacttgggtggcgcggcagcacaccgtaagtgtcgaaaatggattgccactgcgggttggtttgcagcagcaaaatatcttctgtacgggagccagggaacagcatggcaaacgggaagttcgggtcaacgcggccccacaattcaccgttaataaagttgcccagacgcccggcaccaagaccaaacggaatgagtggtgcgataaaatcagagacctggaagaaggaacgtttagtacggcgggcgaagataatcatcaccacgataacgccaatcaggccgccgtggaaagacatgccgccgtcccagacacggaacagatacagcggatcggccataaactgcgggaaattgtagaacagaacataaccaatacgtcccccgaggaagacgccgaggaagcccgcatagagtaagttttcaacttcatttttggtccagccgctgcccggacgattcgcccgtcgtgttgccagccacattgcaaaaatgaaacccaccagatacatcaggccgtaccagtgaagcgccacgggtcctatactgaaaatgaccggatcaaactccggaaaatgcagatagctactggtcatctgtcaccacaagttcttgttatttcgctgaaagagaacagcgattgaaatgcgcgccgcaggtttcaggcgctccaaaggtgcgaataatagcacaaggggacctggctggttgccggataccgttaaaagatatgtatatgatccgcgttataaccctccgcgaatcagcccgcccatgccgcgacgctccataaaggctgcaacctgatggcgaacttcggtcgccagttgcgcttccagactacgctgcgcaagattttctgcttcggcataatcaatgcgccgcagcaggtattttgcccgcgctacagaacgtccgttcatagacagatggcgatacccaagcccaatgaggattgccacgcacatgggatcgcccgccatttcaccgcacaaacggagatcgattccatgtatttccgcttcccgggcgatcatcgccagagctcgtaacattgcaggatgaagactgtcataaatgttcgccacccgggtattgttgcgatcaacggccagaatgtattgagtcagatcgttggtgccaacagagatgaaatcgacccgctttgccagatgcggcagcataaataccatactcggcacttccagcatgatgccgatacgtggtttgggaatttcgtaaccgatcatctcctcgacttcacgtccggcacgttcaatcaggcggcgtgcttcatcaacttcatcgaggcttgtgaccatcggcaacagaatattcaggttgcccgtagcggcattagcacgcagcatcgcccgcacctggatcaagaagatctccggctgatcgagcgtaatgcgaatcccacgccaacccaggcatggattctcttcgctgatcggcatgtaaggcagctgcttatctgctccgacatccagcgtacgcaaggtgacgggtttatcattgaacatttgcagcatcccctgatactgcgccacctgttcttcttcgctcgggaaaccactttgcagcatgaatgggatttcagtgcgataaagaccgatgccatcaatacggctgcccagtttttcttcatgttccgggcttaaaccagcattgagcatgacttttatacgctcaccgctttttaactgcgcgggtaaattgacgtcatcttccgccagacggctaagctcaatctcttcactaattagccgctgatattcttgcagcagtaccggctccggatcgaccagcaattcaccgcgatagccatcaacgatcagcgtcctacgatgcagcacgctaggctgaatatccgcgcccatcacggtagggatccccagcgcacgtaccatgatcgcagcatgggagttggctgcgccatctcgcacgacaacaccgactaagcgatcctggggcagctcagcaagcgttgtcgcactcagttcatctgccaccagaatgaaacgttccggccaggcgttcggcccttgattagcgtcatcaagatgaaacagcaatcgctgacccagcgcacgtaaatcgccagcccgctctttgagatagttatcacttagcgcggcaaactgttcggcaaatttttcaatgaccgtttttaccgcccactctgccacgctgcctttatcaacctcggcaaacaattcgcgacgcagccgggtgtcgctaagcaggtggctgtaaagatcgaaaatagccgccgtttctttttgtgcaccggcggcaaagcgtttgctgtagcggcgaaactcgtttgccgcttcttccagcgccccggtcagtcgttcgcgttccagagccggatccagcgtacttgcctgatacacctgttccattaaaggtaacgtggcatcctgccagccttcggcaatcgccacaccaggtgctgccggtaatgcgcggattcgcgtctggcgatattgcccaaacaaggcagtcaactggctctgagaaagaatagctgccatctgggtggcaagcgtcaccaggaaggattcttcactttcgtcatactggcgcaactctcgttgctgtaccaccagtacaccaagcaactggcgacgttgaataattggtacgcctaaaaacgcgcggaaacgttcttcttttacggaggggatgtatttgaagctggggtgcttttgcgcatctgcaaggtttatcggttccgccagcctgccaaccaggccgacgatcccttcatcaaacgcgagcgttacagtgcgaccgcgtggttttttcagcccccgggtcgccatcaggtagtaacaacgtcgatcatgatcggccaggtagacgctacagacctcggtatccatcgcaagacagatgtcggtaaccagaatatttaacgcctcattcaggcgtggtgcgctggctaccttttcgactatttcgcgcaggcgagtgagcataattggcgtgacttaacctcttttacgtcgataagcagatgcgttttgtggttttggcgtattttcctgcagactcatcaccacactcgcgaactctttcattaccctacggtagacatcacgtttaaaactcaccacctgtctgaccggataccagtaacttacccatcgccagccgtcaaactctggtgtactgctggtttgcatattgatttctgcatcgccgctcaccagctgcaagagaaaccatttttgtttttggccgatacaaaccggcttcgtgtcccaacgcaccaaacgtttcggtaatttgtagcgcaaccagttacgcgtactagcaaggattcgaacgtctttgcggcttaatcctacttcttcaaacaattcacggtacatcgcctgctctgcggattctccggggttgattccgccttgcggaaattgccaggagtgctgaccaaatcgccgggcccacattacctgcccctggcgattacaaatcacgatacctacgtttgggcggtagccatcgtcatcaatcaccggactacctcaaaataaagctttatatacgaatgattgtttcatactccaggaagacggtaaaccactctctgcagggcattacacactaataacaattgaataactcacagttatgtgcagagttataaacagaggaaggggtggatagccgtttttattcaccttttctgtggatagagttgtgaagaactacggaattactacgggaaaacccggagcattctgaataagcccgatatagacattttaaaatattcattatcagtcaatgcattacatgtaattttagtaatgaaaaagagtaattcgtgacccaggtcacacctctcatttacgggttggcgaaagatcaaccaatgccgtatttatccacagaatgtgccactaagttaagcactgaaccactaaaaactggagtttcgtcgcacgtcaaggctgtaaatggaaacagtagtggaggtttttcacagttatcccagctttctgtggataacatggtgtaagatcctgtttattttcagtgaccagatttggaaaacccgttgcagtgttgcgcaactcgattaccggcaacctaaaaagcaatataaatcagagaattgaacaacgcatgtggaaaaagttacactgcgaatattcggcacataattgctgtttgttttttaatcaaggtatcatgacatgtcccaacctcgcccactgctctctcctcccgaaactgaagaacagttgttagcgcaagcacagcaactttctggttatacattgggagaactggcggcacttgtcgggctggttacgccagagaatttaaaacgcgataaaggctggattggcgtgttactggagatctggctaggtgccagcgcagggagtaaacctgagcaagattttgctgctctgggcgtggaacttaaaactatccctgtggatagtcttggtcgtccgctggaaacaacattcgtttgtgttgccccgttaacgggcaatagcggggtgacctgggaaaccagccacgtgcgccacaaactcaaacgcgtactgtggataccggttgaaggcgagcgcagcatcccgctggcgcagcgtcgcgttggaagtccgttgctgtggagcccgaatgaagaggaagaccggcagctacgcgaagactgggaagaattaatggatatgattgttctcggtcaggttgagcggattaccgctcgtcacggggagtatttacagatacgaccgaaagcagcgaatgcgaaagcgcttaccgaagccattggtgcccggggcgaacggattctgacgctgccacgcggcttttatttgaagaagaatttcaccagtgcactactggcccgtcattttctgatccagtaaccatcgctttgacctgccgctttccgggcatataattaccgcttcatttttttggcagggctttttagatgttatttgcatggataaccgatcctaacgcctggcttgcgctcggtacgctgacgctgctggagatcgttcttgggatcgacaatattattttcctttctctggtggtggcaaagcttcccacagcacaacgtgctcatgcgcgccgtctggggttggcgggagccatggttatgcgtctggcgctgctggcaagtatcgcctgggttacgcgcctgacaaatccgctttttacaatattcagtcaggaaatttctgcccgtgatttgattctgcttctgggtggcttgttccttatctggaaagccagcaaggaaatccacgaatccattgaaggtgaagaagaagggctgaaaacacgcgttagtagtttcctcggcgctatcgtgcagattatgctgctggatattatctttagcctcgacagcgtgattacggctgtgggtctgagtgatcacctgtttattatgatggcagccgtggtgattgccgtaggcgtgatgatgttcgccgcgcgcagcattggtgattttgtcgaacgccatcctagcgtaaaaatgctggcgctctctttcctgattctggtgggctttaccctgattctggaaagtttcgacatccacgtaccgaaaggttacatctacttcgcgatgttcttctctattgcggttgaaagcctcaacttgattcgcaacaaaaagaatccgctctgatactccgtacgctctcctgcgggagggcgtactcactccttttaccctcacagtttaagattttcctgctttcaagatatataacgtcggtttataaacagactattatcataggtaggccaaatgaggataaccggatgaaaaaatgggcagtaataatttctgcagtcggactggcgtttgctgtttccgggtgttccagtgattacgtcatggcgaccaaagatggccgtatgattttgaccgatggaaaacctgaaattgatgatgataccgggctggtgagttatcacgatcagcaaggtaacgcgatgcaaattaaccgtgatgatgttagccaaattattgaacgttaacaaataaggtcagcatccggctggccttaagatttttctctttcccttttcccttccctctgccatttttatattccttatgtcgtgattataaaaaggaaacggctatgcaatatcaccgtataccccacagtagcctggaagtcagcacgctggggcttggcacgatgacgtttggtgaacagaacagcgaagccgacgcccacgcacaactcgactatgccgtcgctcagggcattaaccttatcgacgttgccgaaatgtacccagtacctccgcgccccgaaacgcaagggttaaccgaaacctacgtcggcaactggctggcgaaacatggcagccgcgaaaagttaattatcgcctccaaagtgagcggaccgagccgcaataatgacaagggcatccgcccggatcaggcgctggatcggaagaatatccgcgaagcgctgcatgacagcctcaagcgcctacagactgattacctcgatctttatcaggtgcactggccgcagcgcccgaccaactgcttcggcaaactcggttatagctggacggattctgcgcctgcggttagcctgctggatacgctggacgcactggcagagtaccaacgcgcgggaaaaattcgttatatcggcgtgagcaacgaaactgcatttggcgtaatgcgctacctgcatctggcggacaaacacgatctgccgcgtattgtcaccattcagaacccttacagtctgttaaaccgcagttttgaagtaggtctggcagaagtcagccagtatgaaggggtcgaactgctggcctatagctgcctgggtttcggcacgctgaccgggaaatatctcaatggtgcaaaacccgctggcgcacgtaatacgctctttagtcggttcacccgctatagcggtgagcaaacgcaaaaagccgtcgcggcgtatgttgatatcgccagacgtcatggcctggaccctgctcagatggcgctcgcgtttgtacgccgtcaaccgtttgttgccagcactctgctgggcgcaaccacgatggatcagctgaaaactaacatcgaaagtttgcatctggagttaagcgaagacgtattagctgaaattgaagcggtgcatcaggtttatacttatccggcaccataagattaacgccggttaaaaccggcgttaaatattaatgacggcgctgccagatccacagcgccgttattgccagcgcaaacagcgcaccgaagccaatgccaatgggcacgaccgggatgcctatcattaccgccaggctgtaaatgcccagcatcaacaacatggcgctgttttcgccaaggttttgtactgcaatcgcattccccgccccgacgctttttttaccccgctcctgtagcaacgcattgagcggaacgacaaaaaagccccccatcacgccaatcagcatcaacaaggcataggctggcagcagctcgtgttgcagggaaaaaatcagtaccaccacgccaatcaaaatcccggctggcatacagcgactcacggtttccagcgtaactaacttcgctgccgcacctgcgccaaccacgataccaatcgctaccatcgcgttgagataggtgggcgtagcgttatcggtaatgcccagcgccaccggtacccacagcaccaacaggaaacgcagcgtgacacccgctccccagaataaactggtgcccaccaggctaaaacgcgtttcaccattgcgccataggctggtgcaggcattcaggaaactgcgggtcatgttgatgagattccaggactgccccggacgcgccgccgccagtttgggaatgtagatattggcaacgaccgcaccaccgtaggccagtgcgcatgcggccagggcgacgaggacatgccagtcagccagcacaccaccggctacggaaccgagcaaaatcgccgctatggtagaagcttccattaaaccgttagctttcactaacttactacccgtggttaattcgccgagaataccgtatttcgccggactataggctgcagcaccaacacccaccagcgtatagccgagaaacggattgataccaaagcagatactggctgcgcccagcagcttcaggccgttggcaaacatcatcacccggcctttggcgaagctatccgccacctgcccgacaaacggcgcaaaaagaatgtaagcacctacaaacaccatttgcaggatgggctggctccactccggatagaactgcgctttcagtaacgccagagtggcaaacagtagggcattatcgccaaacgcagagagaaactgcgccacgataaccgctttcatccccttgctccacaagctagtgttagtgtgcacactctcactcatcgtgttgttccgcttcgtctacccagcttttcaacgtgacaaagtcaggtttgccgctgccaagtaatggcatctgtttcagatagcgaatatcgcgcggtacagcaagctccggcacgccgtgctcgcgggcatactgttgcaacttatcgcgcgtcagttcgttatctgtggtgaaaagcaccagtgcctcgcctttgctggcatcgctcttaatcgcagtggcatggactttatctgggctaacaccaagtgccagttgttccaccatttccaggctcaccatttcgcctgcaattttggcaaagcgttttgcgcggccctgaatctgcacaaagccctgctcgtcaaaacgcacaatatcgccagtgtcataccagccgcgctccatttcgccgcgaacattctcggcggtgggcacttccagtacacctggcttctccacccgcagatagccgttcattatgttcggccctttcagttgcaggcgtccgccctcttcgataccagggacgctcaacaggcgcgcatccattcctggtagaatacgccctaccgtaccgggtttcgccgccatcggtacgttgatagaaacgacaggcgcgcattcggtcacgccgtagccttcaaggatgcgcaggccaaatttatcctgccaaagctgtttggtactttcttgtaatttttctgcgcctgccaccacatagcgtagacgatagaagtcatacgggttggcgaaacgcgcgtagtgaccgaggaaagtgctggtgccgaacaacacggtgcaactgcggtcatacaccaactccggcacaatgcggtaatgcagcgggcttggataaaggaacacttctgcacctgtaagcagtggcgtaaacaggcctaccgtcagcccaaaggagtgaaacagcggtaacgcgctcataaagcgatcgttggtggtgaagtcggcaatcgttttaatctgctcgacattcgccagaatgcttttatggctatggacgacgcctttcggatggccttcagaaccggaggtaaaaaggatcagcgcctcttcttccggctgctgtttaacctgtgccagacgcggcatcagcaaatgagcgaagatccatactttgtcggcagtggtgacatctgcttttaaatcttccagatagacccagcgcacctgagtaagttgctccggcagatgccagagtttgcctttatcgagaaactggcgggaagtgaagatggttttgatttcagccgccgtaatagcactggtcagcccttttaccccggcagtgtagttcatcattgcgggcatgcggcgacgggcgatggccccaaaaatcactgccgcactgatgcctgcattgggcagcattaagccgatgcgttcgccttcaacactgtatttttcaaggatgcgtccaacaaacagcgttttcgtaagcaatttgcgataggagtctggggtaaagttgacgtcttcgacacatttcttcccggctccgaagcggtacattgcactcagtaaagattcgtacagcgtttcacgcgggcgcaccgccattcgcgcttccatcattatttgatgcagcatttcgccagcgattttgcgacggtcacgggcacgcggcgcatccggcatcgccacctgcgttggtggcaaaatatgcagagtaatttgcgggaacaagcgacgtttaaccagacctttcaggcggctgaagtgcgtaagttccgccccttcaatacgcacaggaataaccgtcgcaccagacttcgccgcgacaaaacccgcgccatcgtagattttcatcaggctgcctgtcgtggtgatgcgtccttcagggaaaatcaccactggtcggccctgttccaccagacgtaccagatgtttaatagccataggttgcgtcgggtcgagaggaacaaagtcgataaaacttttcagccaacgcatataccactgttggcttatactggtgtaaacggcaaacactggacgcacaggtaaaaacagtccaagcaaaatgccatcaataaaagagacgtgattaggcgtaattagaacgcgctcgcccttcagtgcctgggtgtcacccgtaacgcgaacgcgatacaaaacacggcacaaatttcgaaaaaagctaaaaagcattccaactccctttgctctgattcagtaaaagcgaatggagggagattacacgagataaagaacgcgagcgacagtaaattaggtgcgaaaaaaaacctgcgcatccgcgcaggttggtgcaagagacagggtacgaagagcgtaccgaataatctcaccaatcaatacctctgggatcttgattgtggtctgcacgacgactcttcgccagcgagaaaacgcaaaggaatgaagggaaatgcaacgaggtgtgtaaattgtcggttactgttacagattgatgaccggcaaaaaaaacctgcgcatctgcgcaggctggtgtaattcatgtgctcaacccgaagttgacttcacctatcaatacctctgggatcaccactttagcaacctgaagccaaacgccaccagcggtcaatcgcaacagcgtttcgcaaagtgtaaccaaaggtttgcaatctctttttttgtcttacttatttgcgtttggctcacattcccacgatgaaaacacgccaccccttgaaccaacgggcgttttccgtaacactgaaagaatgtaagcgtttacccactaaggtattttcatggcgaccataaaggatgtagcccgactggcaggcgttagtgtcgccaccgtttcccgcgtcattaataatagtcccaaagccagcgaagcttcccggctggctgtgcatagtgcaatggagtctcttagctatcacccgaacgccaacgcccgtgcgctggcgcagcagaccactgaaacggtcggtctggtcgttggtgatgtttccgatccgtttttcggtgcaatggtgaaagcggtcgaacaggtggcttatcacaccggtaattttttattgattggcaacggttaccacaacgaacaaaaagagcgtcaggccattgagcaactgatccgccatcgctgtgctgcgttggtcgtccatgccaaaatgatcccggatgctgatttagccagtttaatgaaacaaatgcccggtatggtgctgatcaaccgtatcctgcctggctttgaaaaccgttgtattgctctggacgatcgttacggtgcctggctggcaacgcgtcatttaattcagcaaggtcatacccgcattggttatctgtgctctaaccactctatttctgacgccgaagatcgtctgcaagggtattacgatgcccttgctgaaagtggtattgcggccaatgaccggctggtgacatttggcgaaccagacgaaagcggcggcgaacaggcaatgaccgagcttttgggacgaggaagaaatttcactgcggtagcctgttataacgatagtatggcggcgggtgcgatgggcgttctcaatgataatggtattgatgtaccgggtgagattagcttaattggctttgatgatgtgctggtgagtcgctatgtgcgtccgcgcctgaccaccgtgcgttacccaatcgtgacgatggcgacccaggctgccgaactggctttggcgctggcggataatcgccctctcccggaaatcactaatgtctttagtccgacgctggtacgtcgtcatagtgtgagtactccgagcctggaggcaagtcatcatgcaaccagcgactaaccgcagttaaagcaattccagcgccagtaattcttcgatggtctggcgacggcgaatcaaccgcgcctgaccattatcaaacagaacttctggtaacagcggacggctattgtagttggaactcatacttgcgccatatgcccctgtatcatgcagtaccagataatcacctgccttcacttccggcaaggcgcgggtttcaacatttcccccttcctgctgggtaaagacatcgccgctttcacataacggtccggcgacgacggtttccaccgttggcgcgtgttccagagaacgaccatcagctgccagggcactgatatggtggtaactaccgtacattgccgggcgcatcagatcgttgaacccggcatcaaccagcacaaagtggcggctccccatttgtttgacgctccgcacctgagtaattaatacgccagactgcgctaccaggaagcgacccggttcaatttccagtttcacagggtggcccaaatggcgggcgatttgctcacgcgcggcattccacagaccataataatgttcggtatcaaccgcctcttcaccctgttgataaggaacagaaagcccaccgcccgcagaaatagcctgtaaatcctgaccgaattcgatgacctgacgcaccatagcaccacacacctgttccagatgggcataatcaacgccagaaccaatgtgcatgtgaatgccgaccagctgcagatgatgacgttgtatcacgtccagtgcggcgggcagatcggtgtaccagataccgtgcttgctgttttcgccaccggtattggttttttggctatgtccgtgaccaaaccccggattaacgcgcagccatacccgatgccctgggctaacctggcccagttggtcgagcatatcaacagaacccgcattcaccggaatttgcaattcactgacgcgttcaagcgtcgcctgatcgataacatctgccgtaaaaacaatatcatcggggtgcgtttgcggattgtaacccgccgccaacgcacgctctatttcgcctaagctgacggaatccactttcacgccctgctcacgcattaagcgcaaaatatgaatattggaacaggctttctgtgcaaagcgcaccacatcaaactgtttcagcgctgcaatctgccgacgaataatttgcgcatcgtagacccacaccgggcagccaaattcagcgggcaaacgcagcagattttcggcggtgagatcggtatcggtgctgaacagactatgtggcataacaaactccagataagtgcttttttatgattacgccacatcataaaaagaataaaaaatatcgatttatgtcgagtctatgcaaaaatgatatggattaccggattgcgagagagcgctaatggccgccgttaacttacgtcatattgaaatttttcatgcggtaatgaccgccggaagcctgactgaggcggcacacctgctacacaccagtcagccaaccgtcagccgcgaacttgcgcgctttgagaaggtgatcgggctgaaattgtttgagcgcgtacgtgggcgattacatcctaccgtgcaaggactgcgtctgtttgaagaagtgcaacgatcctggtacggactggatcgcattgtcagcgccgcagaaagtctgcgcgagtttcgccagggagaactgtctattgcctgcctgccggtctttagccaatcttttttaccgcagctcctgcaaccctttctggcacgttatcccgatgtcagcttaaatatcgtgccccaggaaagtccgctacttgaagagtggctcagcgcccagcgtcatgatttaggactcactgaaacgctccatacgcctgcgggaacagaacgtaccgaattactctctttagatgaagtgtgtgtgttacctccgggtcatccgctggcggtaaaaaaggtattaacgccggatgattttcagggtgagaactacatcagcctttcccgtactgacagctatcgccagttgctggatcagctatttactgaacatcaggttaaacgacgcatgatcgtagaaacccacagcgccgcgagtgtctgcgcaatggtacgggcgggggtaggtattagcgtggttaacccgctcaccgcactagattatgcggcaagcggtttagtggtgcggcggttcagtattgcggttccgttcaccgtcagcctgatccgccccctgcaccgcccgagtagtgcgctggttcaggcgtttagtgggcatttacaagcggggttaccgaaactggtcacttctcttgacgctattttgagcagtgctacgacagcataattagctcagcataaaagcgacagcatcctcggcatggatcgccgcggtatcaaacacaggcaaaacactgcgctcttctggcaccagtaaaccaatttctgtgcagccaaaaatgacgccctgtgcgccctgttctgcaaggcgagcaatcacttgcgcacaataagcgcgactcgcttcggtaaattgccccagacacagttcttcaaaaataatctgattaattttcgcccgttcatccgcttcaggaataagacaattgatggaaaattgttccgtcagccgcccgcgataaaaatcctgttccatggtgtaacgcgtacccagcagcgccacacgagtcattccggccccggtaattgcacgtccggtggcatccgcaatgtgtaagaaaggcagagtgcaacgactctcaatggcatccgccactttatgcatcgtattggtacatagcacaataccttctgcgcccgcccgctgtaagccaagcgccgcctcagccagaatgtccccggttttatcccattccccgcgacgctggcactcttctatttcatgaaaatcgacgctatgtagcagcacttgcgcagagtgaagcccaccaagccgctgtttaatgccttcatttatcaaacgatagtaaggaatggtggattcccagctcattcctcccagcaaaccaattgttttcattcctctctcctgatgtgtgttaccgcaacaaggctgaataaggaacgagacaaacgcctcaacggccaagtgcccaatctctattaacgaaaaaagggccggatgtacagcacatccggcccgtgaaatcagacgccgatatttctcaacttctcgcctgccatcagtttgcgttcgatatgttccagcgtgacatttttggtttccggaatgagccagaaagtaatgcccacaaacgcaatgttcagcgcagtgtagagccagaacgtaccggcagcgccaatgctatcaagcagtgtcaggaaggtcgcgccgataatcatattgctcacccagttcgtggtggtgctacaggtaataccgaaatcgcggcatttcagcggctgaatttcagagcacaggatccacaccactggcgcggcgctcatcgcataaccggcaatacacatcatcgtcatgccaacagagagccaggacaagccactggaagccgtaccgttatcaaactgcatcaggcaatagcccagcaccagagtgcctaacgccatcacgctgaaaccaattttcagagccggtttacgccctgctttatctaccgtaaacaccgcaataaaggtggcgaacataaaggtcagccctacgaccagagtcgcaatcatctgttgttctgtggtcgtaaagcccgccattttgaagatacgcggcgcgtagtacatgatgatgttcataccggtaaactgctgcatcgcctgcaacaacataccgagaaacacagcacgacggacgttacggttgatcttaaacagtgcccaaccgccctgttttaacttcaggctttcacgaatttcgttgagttcttctcgcgctttttcgctcgtatcgcgcagcatacgcaatacttcttccgcctcaatatgacgccccttttccgccagccagcgcgggctatttggcaggaagactaccagaataatcagcagaactgctggtaaagcaagaacccccaacattgcgcgccagttaccgctataactgaacgctgtatcggataaaaacgccagcacgatgccgagtgtgaccatcaactggtacatactgatcatcttaccgcgaacgttttcacttgccatttcagaaagatacagaggagcggtgtaagacgcgatcccgacagcaatgcccagcaccacacgagcggcgattaacatctctacgctggtcgcaaaagcggaccctatagaaccgagtacaaacaggatggcccccgccatcaggctgtatttacgccccaggcggaagctcagccaaccattaaacagcgcaccaattgctgcaccgagcatcatgctactaaccacccattcctgcaaacgactggtcagcacaaagtgatcggtaatgaacggcaacgctccggcgattacgccgatatcaagaccaaataacaatcctgcgaccgcagcagctacgctaacaaacatattcatacgccgcgtatcccgcaaagaacgtggcgttaaagcagattccgtattgatagtaaccattttttcctgccagcagagagtaagacatagtgaaaaaatacgtgaacaactcacgcaggtgtcaggtcggaaacagcataaatatggattaaattgctgcgacatgtcgttatgtgatggatattccaattttcaaattaagttgaattattgagattattattaaccacctaattttacagcagataaaattcataaagttcattaattgataattaatatggattatttcataaccatgatatggattatgatgatctacaggtataaaaaaccctgccatgcggcagggtcataaaagtaagaagaatgaattaacgcgccagccaaccgccatccacggcaatggtataaccattcacataatcactagcgctggaggcaaggaacactatcggccccatcaggtcactcggcagtccccaacgaccagctggaatgcggtcgagaatttccgcgctacgttgttcatctgcccgtagttgttgagtattgttggtcgccatgtaacccggggctatcgcattaacattaatgttgtgtttagcccattcgttcgccatcaatcgcgtcacacccatcacgccgcttttacttgcggtataagaaggcacacggatcccgccctggaaggagagcatactcgcgatattgataatcttgccgccattgccttgcgcgataaagtgtttcgccgctgcctgagacatgaagaatacgctcttgatattcaggttcatgacatcgtcccagtccttttcgctgaactcgagagcatcttcgcggcgaatcaatccggcgttattcaccaggatatcaatatgaccaaactccgctaccgcgcgatccagcagtgctggaataccatcaatctttcgcagatcggcggtcaggcttaaaaaacgacgccccagcgctgtgacctgctcgatggtttcagtcggttcaacgatgttaatgccaacaatgtcacagcccgcttgcgccagccccaacgccatcccctgacccagtccagtatcacaaccagtgacgaccgcaactttaccttcgagagaaaatgcacttaaaatcataacaataccttattcgtttatgcccacaattagcgcaaatctttaacggccacatggtccatatcatcaaagacctggttttcaccgaccatgccccagataaaggtataagctttggttccgacaccggaatggatgctccagctcggggagatcaccgcctgctcgttatgcatcacaatatgacgcgtttcttgcggctgccccatcatgtggaaaacgcaggcgtcatcatccatattgaaatagaaataaacttccatccggcgctcgtgggtgtgacacggcatggtgttccacaagttacccggagccagctccgtcagccccatactcaattggcaggtttccagtacatccgggacaaaatatttgttaatcgtgcgacggttactggtgaggttatcgcctaacgtgactggagatacttcgtccggtgtgacttttttggtgggatacgtcgtatgcgcgggtgcgcaattgtaataaaacttcgccggagtgccggtatcaatactggcaaagacaacttcttttgcacctttaccaacatacagggcgtcgcggtgaccgatttcatagcattggccatcgacagtaatcgtaccggcaccgccaatattgataacacctaactcgcgacgttcaaggaaatagcttacgccgagttgtttaccaacttccccgccaacggaaaccgttttagttatcggcataatgccgccaacaataattcggtcaatgtggctgtaaaccatggtgtactcatcggcgacaaataccttttcaaccaaaaattcattgcgcagcccttgggtatccagcgtttttgcgtgcgcactgtggatgctctgtcttacgtccacatcaacctccgataatcagtgaagcgtgaaaatagaaaacgatagtgaaacactgtttcgttttctctataaagggatgatatgcccatgggctagggttttcaattaaaaataaaacaatgtttcatttttaagttaaggattaaaaaaagtgcagtgtcgatcacgaatatgtcatgagaatggaaaaatgagggagcccagaaaatgtatgtcgacttgccagccatcattattcaacagattaatgacggcagatatttatcggtaaggaggaaatgcagagttattcgtcacgttcaatggtcaatgccacaccctggcccccgccgatacaaagcgttgccagtcctttgcgggcattacgtttcaccatttcatgaaccagagaaaccaggattcggcaaccggaagcgcctatcgggtgaccgagtgcgatcgcgccaccattgacattgacccgacgctcatcccactcaagcatcttgccaacgctaagcgcctgtgcagcaaacgcttcattagcctcgataagatcgacttcagccaactgccagcctacacgctccaggcaacggcgggtcgcatacaccggcgcaattcccatcaatgccggatctacaccaacgctggcaaatgcgcgaatgcgggccagcacgggtaaattcaacgctcgtgctttggcttcgctcatcatcattaccgcagctgcgccatcgtttatggaacttgcattacccgctgtcacagaaccgagactatcaaaactaggatttaaacgggctaagccttctgcgctggcgtcagtgcgtggctgttcatcggtatcaacaaccaacgtctgcccgttactttgggtcattaccgggacgatctcatctttaaatcgtccggcgtcaatcgccgctcgcgctttttgttggctgctaagtgcgtaagcatcctgcaactgacggctgatgccatattcgcgagccagattttcggcggtgacaccaatatgataatcattgaaggcatcccacaacccatcatgcacaagactgtcaaccaactggctattgccaagctgtgcaccggtgcggctatcagtcagaacatgtggtgcgcggctcatgttttcctggccaccggcgatgacaatatcagcctcgccacactgtatcgcctgagtagccagatgcagtgctttaagcccggaaccgcaaacgtcattaatagtgattgcagaaacgctattaggcagaccacctttaatagcgctttgccttgccggattctgccctgcccctgcagtcaacacctgaccaagaattacttcatccaccgcatatgcaggaacgccggtacgttctattaacgctttcacgaccagactaccaagttccacggcggaatgacccgctaacgcaccacgaaagcagccgataggtgtccgtaacgccccgacaatcacaacgtctttcatcacaacctcgcaccaattaacagtgcaatagtaaatgattgttaattacagttatcttaattgtttaaaaaaagtgatttttatcacaaaggaaatatgcctgagcagcagtcagagacataactggcacgtaaggtttgcaaccactaacccaccaatagaggggtagatagggcgttaatctcccatacttaacctggtttatggtaaattgccctccattttgtttaatttgtagatgatacgttcagataatgtctaatatttggtctaaagaagaaactctgtggagtttcgcgctctacggcacagccgttggtgcaggcacgctcttccttcctattcagttaggtagcgcaggggctgtggtcctgtttattactgctctggtcgcctggcctttaacatattggccacataaagccttgtgccagttcatcctcagtagtaaaacaagtgcaggtgaagggataacgggcgcggtaacacactactatggcaagaagattggtaatctgattaccacgctgtacttcatcgccttttttgtcgtcgtgttgatatatgcagtggcaattaccaacagtcttacggaacagctggcaaagcatatggttattgatcttcgcatccgtatgttggtgagtctgggtgttgtattaattctgaatctcatttttctgatgggacgtcatgccactattcgggtaatgggatttttggtattcccattgattgcctatttcttatttctttccatttaccttgtcggtagttggcaacctgatctattaacaacccaggtagagttcaatcagaatacccttcaccagatatggataagcattcccgtgatggttttcgcctttagccatacgcccattatttctacgtttgccatagacagacgtgaaaaatatggcgaacacgctatggataaatgcaaaaaaattatgaaagtcgcttatctcatcatctgcataagtgtactgttctttgtctttagctgcctgctttctattccacctagctatattgaagctgctaaagaagaaggggtcaccattttaagcgcgctttctatgctgccgaacgccccagcatggttgagtatttccgggattattgtcgcagtagttgcgatgagcaaaagtttcctgggtacgtactttggcgttattgaaggtgccacagaggtcgtcaaaacaacactacagcaggttggtgtaaagaaaagtcgtgcatttaaccgcgcactaagtattatgttggtaagcctgattaccttcattgtttgttgcattaacccgaacgcgattagcatgatttacgcgatcagcggcccgctcattgccatgatacttttcatcatgcctacgctgagtacgtatctcatcccggcgcttaaaccctggcgttccatcggaaatctgattacgctgatcgtgggtatcctgtgcgtaagcgtaatgttctttagctaatatcagttgtggatggttcaaaattgctacaattttgaaccattccatttttcataatattcatttgttattattccaccctatcacttctctcgtcatatcctagtattatcagttagttaaacacacaaagagatctgaacatcttaaataagactatttaagatgcataacttagattcgcaagatatcttctggtcattcaaaaacaatttgcgatatagatattcttataccatgagatagttatctggaccgctctcaaccatgcaagattaaatcagtgaaacataatcatatttgataacgagaaatgcatttttaaatgccttactcagaattatagcaaatacagattaatcgcaatttttcccggcaaaattacaaaatcatggtgtattgacatcatcaataaccaatgaaattatgcaattatatacggatagggaggttcttaacatggggctttgtagtcgttataaaagtcttacatgcaatagttgcagtatgcattgccaaataatgccagaagagagtccgcgtttgcagtattgcgcaaacagctgtttttgtatgtggcccgaagaaagtagttattttaatcgtggtgtggtagaaggtatcttaacaaaaaaccacaatgcgagattaagcggatatatttttgtcgattttagtgtaagttttttacgtctattccttgaaaaagactggattgactatcttgcaagtactgacatggggattgttttagtcagcgaccgcaatatgcaaagcttagctaattactggcgaaaacacaacagtgcaatatctgctgtcatatataatgatgatggtcttgatgttgccaatgaaaagatcagacaactatttattggtcgttatttaagttttaccggaggtaacacattaactcagatggaattcaccataatggggtatatggtttctggttataatccatatcagattgctgaagttctggatatggatatccgtagcatctacgcgtacaagcaacgaatcgaaaagagaatgggtggtaaaataaacgaattatttattcgtagtcatagcgtccaacattgatactcaacgaccagccagaatcatactctgtttatacgggcatttattgaaatgtccgtattttataaataggccgtcccctcaagagtaaacaccatagtatttaaaaccatcacacgaaaaattcagaagcattacgaaatatgaatttacaaacaatagtggcataaatgttaaccatgttaatttacgtaaagttttacgttgcaacattaaagcctcatttcaatcatcatgataaatataaaattaatatatatttatgccgtaaataccaatatacttagcaaactatgtgatctccatttcgattgatttagtgtttattgacgtatgtactggattattaacgataatatcgagttctggcctgagcaccgaaaattaataagcgtacataacgccgatcttaacgtcgttctgacaacgccagccagtcgatgtttaagtcttctacttgaagcttttcctgatgtggttgcacaacaagattttttcaccagagtctgggaagaagaaggtatgcgtgtgcctactaacacgttatatcagaacatatccattatcagacgcggatttcgcgctgttggtgatactacccacagcctaattgcaaccgtgccgagaagaggattcaagatccataatgacattaacatacaaaatcatgtaataaacagcagtacagacgcacatacacacaatgccccacctgccataaaagttaatgcgggatacaaagagagcattggtggcgcaaagaatttcaataacaaaatcctcaaacatataaaaagtcatctaattatgttgagcgcatttgtcataggcgcatattctgcatattggctatggaataataatcaaccgaagccatttttcaaggattacaagactgttgcggaaattaatggctgccattttaatgtaacagaagatacaattgatgggttgaaagagttcgataaatataaaacacggatactggatagcgggattaactgtaaaaaacatccgtggttatacttccctcttgcaaaatccagtccggggatgattgttatggcatgcaataaaaactataaccaacatgaagtggcaaactgtttaaccctgtcttaccgtgaggttaatcgtgattgattataaaaaaaacttattatttattttagtttttatcagtgggtttattctcttcactgtctattcttacactgcagaaaaaatgatatataacgaaacatgcactgcaaattgggtaatttttaatgaccagggacgagcaaatcttaccatcgactttatgtataacaaaaaaaataaaacaggaactgttgcgttgagtggaacctggcaacaaggtaacagagaaagtaaaagtatacggcgaaatattgaatacacatggattgaaaactatgacacagcccatttaacaagtaagaaagttaataagtttgagattatggatcaagttgatgatgatagacttgcacaacttattcctgatttttatgtctttccagaaaaaagtgtaagctataatatactaaagcaaggtaagcatgcttttattttgagcattggtaacagagcaataatgcattgtgcaaggtaaactaaaatagataacaaaaagatggaacctcgttaatcataaaacaataaaattaaatattctcgcagtatatggcagtctaaagcatcaaagatttgatcaacatctttcattttagacatctccttgcaatgtaaaatatcatgtatcaacaacatctggtgcaaatccaactgtcgaactcgacattcatcttagctcgattattattccttcgtacagtgcttgtaaacaatacagaaagaggattattaagaaccagtttactcagactatcaatagaggaaaggactaacgtttctttaaaagaattgatttcatcatctgttaaactaaactcatcattgacagatcgactgatataactgtttttaactttactctttacgttgactttattgacagaattaacattcacatatctactatttaatgtccaacttgttgtttgcgtgagaacattctcagcattaaggaatttttttaacggaatccttggtttctttttgctgtcgctatttacaatatcatgcatatagaccatttcatgaatctggctaaattcaatgtccattgtatacctcacatttttaccgtgactcgatgttactgttcaataatcaccttccatcaatactaaaattaatacccctaatgtgccgataacaaatatagtcattctacgtaacgtctccataaggtgatatttgacattatcagaagctgcgaattcggattttgctctaatcaaatgagagaaatgtaaaatgaagccacgaaatattaataatagcctaccactgcaaccattagttcctgatcaggagaacaaaaataagaaaaatgaagagaaatccgttaatccagttaaaatcacaatggggtctggtttaaattatattgaacaagaatctcttggaggaaaatatctaacacatgatttgagtataaagatagcggatatttctgaagagataattcagcaagcaatattatctgctatgagcatatataaatttagcataacagatgatttaatgagtatggctgtaaatgaactcataaaactgaccaaaatagagaataatgtagacctgaataaattcactactatatgcacagacgttctatccccccgcgtcaccagacataataaagaaaaaaacaaacgacattctacccttctcaaaaatcccctttttaattttcattgaaaaaatggcaattgatactatgaatccaggtcatacacattaaggcatttatgtaatgtcgtaattaagataactaataaggtgaatattagtaaaacaactaatgatgttattagtttgtagtgaacagtacttttaccaataatgaaaaatataccataagcaatgcaagcttaaaactcataatttaaaaaagataaatataaaaatatcaatgagtcaatcaataataatttggcatcacgagacacatcacagaggaatattatgagcacagaaacaattgaaatattcaataatagtgatgaatgggcaaatcaactaaaacacgcattaagcaaaggagaaaatctggcattactacatggtttaactcctgatatccttgatagaatatatgcatatgcattcgactaccatgaaaagggtaatataacggacgcagaaatttattataaattcttgtgcatttatgcgttcgaaaatcatgagtatctaaaagattttgcaagtgtatgtcagcccaaaaagaaatatcaacaagcatatgacctttacaaactaagttacaattacttcccgtatgatgactatagtgttatttatcgtatgggtcaatgtcagattggggctaaaaatatcgataacgcaatgcaatgtttctatcacattattaacaattgtgaggatgatagtgttaagagtaaagcgcaggcatatattgaactcttaaacgataatagtgaagataatggctaagcattacaatcatttggttaaatttgctggttatagtgcagttaaccactataaccagcacctcttatgttttcttaaatcagcatcttaaaacagttaagagcatactataaatcattatttttcaatgcgttagagaacaatctactttatcaaaattgaataaggctatttcagattacatcactgaattcctaagataaattagtgaacacaaccatagatatgtcaaatgtaatttcctgtagcgttaatgacacataaatatgaatagccataatttctattgcttaagcaggatgcaagaaaccaattttttcatagaggttaactaatggacttagaaaataaattcagttatcattttcttgagggattaacgctcacggaagatggaattcttactcaaggaaatgagcaagtttatattccacagaaagagttaggtgtattaatagtattacttgaatccgctggtcatgttgtactgaaagatatgatcatcgaaagtgtatggaaaaatattattgttagtgacgagtccctgacaagatgtatctattctttgcgctgcatttttgaaaaaattggctatgatcgttgcatagaaacaatctaccggaaaggttatcgtttcagcgggcaggttttcaaaactaaaattaatgaagataatactagtgactattccatagctatattccctttcactactagtttgaatacactggatccattaatacttaatcaggaattagtgcaaatcattagtaataaaaaaatcgatggtctctatacctatccgatggctgcgacaaatttttgtaatgatcacatatctcaaaatagtttcttgagcagattcaagccagattatttcgttacaggaagaataaaccagaataatgcagtgaacactttatacattgagttgatcgacgctaaaaaccttttcctcatcgccagtaatcatctccctgttgatgaactacataatacaagtcaatttattatagataatatccttcaaacggtacataaaccagaacgatctgtaagattagctaagcaggaccaaggatataagaatcattatttaagtgatgaaatgttagccggaaagaaagaactttacgacttcacccctgaaagcatttacagggccatgactatatttgatagattacaaaataaaagtgatatacagacgctaaaaacagaatgttattgccttctagcggaatgccatatgtctttggcacttcatggaaaaagtgaacttgaacttgctgctcaaaaagcattagagcttttagattatgtaagtgacataaccactgtcgatggaaaaattttagctattatgggactgataactggtctgtctggacaagcaaaagtatctcatatcttatttgaacaggctaagatacacagtactgatatagcctctctctactactatagggcactagtccactttcataatgaaaaaattgaagaggcaaggatttgtatagacaaaagtctacaactcgaacccagaagacgaaaagcagttgtgataaaagaatgtgtagatatgtatgtgcctaacccgctcaaaaacaacattaaactctactataaagaaactgagagtgaaagccatcgagttataattgacaacattttgaaattaaagcagctgacgagaatttgtatgcgataaatttttattgacgcaattttattatttagatgtatgcaacttgttatttaaacaacagagataaaaatatctaagatattcaccttattgcaagatatttaaaatgctctagagttaaaagtatgatgtaaagaccattggcctggacaattaaaaaagggagctttatgactaatccaatcggtatcaataatttatctcaaagtagtaatatagcgaatgcaacgggtgatgaagtcgtaagtttagataaacacatcaacaccagtgctactgatacagatcaaatacaagcatttatagttagtacatggatggcgccttttcaaaatgatatgtatagtgaagataatcctatcagtccttactataaaattgagtggtaaacgattgaccaaataaatcataacgagatacttttataatagtatctcgttcctttcattcaatcctcacacatgaaaaaatatgcgctcaccaaaagttaaattcttaaccatcttcacgttttgtatatttattacaaaaatgtctttcgccagcaactcttgctctaatgaagcaggaacaatgttcagaatcgaaccaaatttaattaaagctatcgctcttgttgaaagcaatctaaaaaaggatagcataggcaagaacagagataagaataacaatataaagagtttagattattggttaatgcagataaaccagatgcatattcccctgttaaaaaaacgtggaataataaaagatgaacgagatttgttagataacccttgtctgaacattaaaataggaaccgagattttatataaccattttagtcgttgtggagtaacgtggcaatgcctggggacttataatgcgggttttgcaatggataaccaaaaaaagagacagcaatatgccccaaaatatatattgtatataccaggcttaatgaactaaacaatcgtaaggcttcagcaaaatgagcctaaagcctcttttttttatatagtgcaaacacccatacgtaaagctgttttgatcaactcgataccactgtgaacatctaatttcttcatgatattgagtctatgagtttcgactgttttcctgcttaactgcaagaaattagcgatttctttgtttgttttaccatcagctatgagttgtaatatttcactctcacgatttgtaagttgattatcagaggaatacctggaagatattttttcacaatccatatgtacactatcaaaataagtgtaaccattactaatgctatcaatagcacgatttagtttcgccgggtgactggttttccatacgcatcctttcgcacctgcttcaagcaattttatactatcaatatacggcatctttgctacaaatgtaataatatgagcatctatcttatggcttttaacccattttacgagttcggcccccatcattccacctgcaaattctcctaaaataaatatttaggctgtagatttgttacactccgctatagctttcttcagatctttatagcccacttatttaacaacttgaaaataaggtgttttacctgggttgttacaaaaggattgcattgcgtaaacgctttttatttacaacaaaatggggaagtattacggcgaagataaattggagcgggcgaagggaatcgaaccctcgtatagagcttgggaagctctcgttctaccattgaactacgcccgcttcgagatgcgtaaggcattataaaccttacgctctccttagcaagtgccacgctgctgactgctgattaattcgccatcagcattttggcttgctgccctgaggcggcaagtaacgtagcggatcaattgccgttgcacggtaacgaatctggaaatgcaggcgaacagatgccgcatccgtgctccccatagtggcgattttttgcccagccttcacgctttgcccattatttaccagcatcgtgtcattatgggcgtaagccgtaatgtaatcttcactgtgtttaatcatgatgagattaccgtagccacgcagctggttgcccacatacaccacctttcctgcacccgcggcgtaaataggtgtaccccgtggagcactgatatcaatccctttattgccgccatctgctgtgctatacggcatgataactttccctgtcgttggccataaccaacaacgttgccctactggcggccaggaacttttcggtaccgcactactcggtgtaacgcttgcggttttggtcgtacttttggcggtacttttacgtgtaatactgctacttttcgccccacccagttttagtttctgaccaacttcaatggtgtaagggggggaaatgccgttcagtcgcgccagttcttttacgctggttcccgtggtgcggctaatacgatatagcgtatccccccgtttcacggtgtaaacggagccggaatacgttcctgtatcggaacttttgctaccgctacagcccgccaaaagcagtccaacgcttaacaacatcacgatacccagagattttttattcaggcgtcccgcactcaaaatctttcctcgcttaaaaaacaagacgccttatcatagcagccagcctcttgatacccaatctcttgcttctggaaaaacgtggtaatagagaaagaggttaatttcatttggcaaagggaagtatcatcagcaaaatattcgctgtagaggtatcgaacttcctgactttttaccctatttcccatcctgatgcgtaataatcccaatttatcacattgattttatcgccactcatattgatacgtatcactgcccctattcagagtcctgtttcgtatcatatctgtgtttttttaacgtcatcacacttcctacctcccctaacgcttatcgtcgtttctggcgtaaatcttgcctgcttagactaaatctttgccataagaaccaaatgttcaaatcgaggggatttctatggaagcgcgggaagcaaccgctacgggtgaatcatgcatgcgcgtcgatgccattgctaaggtcaccgggcgggcacgatatactgacgattatgttatggcgggcatgtgttatgcgaaatatgtacgtagccctatcgcacatggttatgccgtaagtattaatgatgaacaagccagaagtttgccgggcgtactggcgatttttacctgggaagatgtgcctgatattccattcgctacagctgggcatgcctggacacttgacgaaaacaagcgcgataccgccgatcgcgcactgctaactcgccatgttcgtcatcatggtgacgccgttgccatcgtcgtggcccgcgatgaactcacggcagaaaaagcggcgcaattggtcagcattgagtggcaagaattacccgttatcaccacgccagaagcggcgctggcagaagacgctgcaccaatccataacggtggcaatttactgaaacaaagcacgatgagcacgggtaatgtccaacaaacaatcgatgccgccgactaccaggtacaggggcactatcagacccccgttattcaacattgtcacatggaaagcgtaacaagcctggcgtggatggaggatgacagccgaattaccatcgtttccagcacccagatcccgcacattgttcgccgcgtggttggtcaggcgctggatattccctggagttgcgtacgagtcatcaaaccatttgtcggtggcggttttggtaataaacaggatgtactggaagagccaatggcggcattcctgaccagcaagcttggcggcattccggtgaaagtttcccttagccgtgaagagtgtttcctcgcaacccgtacccgccacgcttttaccattgacgggcaaatgggcgtgaaccgcgacggaacattgaaaggttatagtctggatgttctgtctaacaccggcgcttatgcatctcacgggcactccatcgcttctgcgggggggaataaagtcgcttacctttatcctcgttgtgcctacgcttacagtagtaagacctgctataccaacctccccagcgctggtgcgatgcgtggttatggcgcgccacaagtcgtatttgccgttgagtctatgcttgatgacgccgcgacagcgttaggtattgatcctgttgaaattcgtttacgcaacgccgcccgcgaaggagatgctaatccgctcacgggcaaacgtatttacagcgcagggttgccggagtgtcttgaaaaaggccggaaaatctttgaatgggaaaaacgccgtgcagaatgccagaaccagcaaggcaatttgcgccgcggcgttggcgtcgcctgttttagctacacctctaacacctggcctgtcggcgtagaaatagcaggcgcgcgccttctgatgaatcaggatggaaccatcaacgtgcaaagcggcgcgacggaaatcggtcagggtgccgacaccgtcttcagccaaatggtggcagaaaccgtgggggttccggtcagcgacgttcgcgttattagtactcaagataccgacgttacgccgttcgatcccggcgcatttgccagtcgccagagctatgttgccgcgcctgcgctgcgcagtgcggcactattattaaaagagaaaatcatcgctcacgccgcagtcatgctacatcagagtgcgatgaatctgaccctgataaaaggccatatcgtgctggttgaacgaccggaagagccgttaatgagcttaaaagatttggcgatggacgctttctaccaccctgaacgcggcgggcagctctctgctgaaagctccatcaaaaccaccactaacccaccggcgtttggctgtacctttgttgatctgacggtcgatattgcgctgtgcaaagtcaccatcaaccgcatcctcaacgttcatgatagtgggcatattcttaatccactgctggcagaaggtcaggtacacggcggaatgggaatgggcattggctgggcgctatttgaagagatgatcatcgatgctaaaagcggcgtggtccgtaaccccaatctgctggattacaaaatgccgaccatgccggatctgccacaactggaaagcgcgttcgtcgaaatcaatgagccgcaatccgcatacggacataagagtctgggtgagccaccaataattcctgttgccgctgctattcgtaacgcggtgaagatggctaccggtgttgcaatcaatacactgccgctgacgccaaaacggttatatgaagagttccatctggcaggattgatttgaggataacatcatgtttgattttgcttcttaccatcgcgcagcaacccttgccgatgccatcaacctgctggctgacaacccgcaggccaaactgctcgccggtggcactgacgtactgattcagctccaccatcacaatgaccgttatcgccatattgttgatattcataatctggcggagctgcggggaattacgctggcggaagatggcagcctacgtatcggctctgcaacgacatttacccagctaatagaagatcctataactcaacgtcatctcccggcgttatgtgctgcggccacgtccattgctggaccgcagatccgtaacgtcgctacctacggtggaaatatttgcaacggtgccaccagcgcagattctgccacgccaacgctaatttatgacgcgaaactggagatccactccccgcgcggtgttcgtttcgtcccgattaatggctttcacaccgggccgggcaaagtgtctcttgagcatgacgaaatcctcgtcgcctttcattttccgccacagccgaaagaacacgcgggcagcgcgcattttaaatatgccatgcgcgacgcaatggatattagtacgattggctgcgccgcacattgccgactggataacggcaatttcagcgaattacgcctggcatttggtgttgccgcgccaacgccgattcgctgccaacatgccgaacagactgcacaaaatgcgccattaaacctgcaaacgctggaagctatcagcgaatctgtcctgcaagatgtcgccccgcgttctagttggcgggccagtaaagagtttcgtctgcatctcatccagacgatgaccaaaaaagtgattagcgaagccgtcgccgcggcggggggaaaattgcaatgaatcacagcgaaacaattaccatcgaatgcaccattaacgggatgccttttcagcttcacgccgcaccaggcacgccgctcagcgaattactccgcgaacaaggactgctaagtgtcaaacaagggtgctgcgtgggtgaatgtggtgcctgtacggtgttggtcgacggcacagcaatagacagttgcttataccttgccgcctgggctgaaggaaaagagatccgcacgctggaaggtgaagcgaaaggcggaaaactttctcatgttcagcaggcttatgcgaaatccggcgcagtgcagtgcgggttttgtacgcctggcctgattatggctaccacggcaatgctggcgaaaccacgcgagaagccattaaccattacggaaattcgtcgcggactggcgggaaatctttgtcgctgcacggggtatcagatgattgtaaatacagttctggattgcgagaaaacgaagtaaaaggatatccggcctgaattcaggccggattcactgaggttatgtgtttaacaactcatatttcttaatcttgcgatagagcgtagcaatgccgatgcccagttcatcagcaacttgcttcttgctgttatgacgactaagcgcctcgcggatcatttgcttttccatctcctccagcgccgtgccgcccgcatcatcgagactcaggtgcgcctcactgacctctgttacatcactttgctccgttgtgccattattcagcagatttggcggcaatagcgtgctgtcgataacttcaccactaggaaccacgttaaccagatattccatcaaattgcttaactcgcgcaggtttccgggccaacgatgcttacgcaatatttcgacgacatcgggagcaatgccaggataaacgcttcccagacgacgggtatgcagatgtaaaaagtaatgcaccaatagttcaatatcttcctgacgttcacgcagcggtggcagagttatcgggataacattaagtcggtagaagagatcttcgcggaatttaccttcggcaatgaactgggccaaattctgattagttgcagaaatgatgcgaatgtcgacttgtattgggctactggcaccaatcggcagaatttcacgtgcctcaatagcgcgcagtaatttagcctgcaacattaatggcatatcacctatttcatcgagaaacagcgtgcccgtattcgccgcctgaatcaaccctgttttaccgttggcagaagcgccagtaaatgcacctttaacataaccgaacagttcgctctccagaagctgctccggaatcgcggcacagttgatagcaataaagggtttattccgtcttccgctcaacttatggattgcacgggcgacgacttctttacccgtgccgctttcaccaaccaccataacgctggatgggctgggtgcaatacggctaatgagtcgttttaattgccgcataacacggcactcgccaaccaattgttcaatatgcggttcatcaggtgcatttgctacagaaaaactggtatggctttggtgaaacgccattaaaaataattgtcggccctgaatgttatgcaattgaccaatgattaattcacttttatcgtcccaactaacaatatgctgcatatgtccatgggtaaaattactctcaaatgttaatggtctgaaacggataggtttcccaataatattattttgcacaacaccaagtgtttttaaggcagtctgattaacaaactgaacccgattttcatcatctacaactaatacgccctgatccatattatcgatcatggtcgcaaatattttactgatgttatctcctggcccctgatcctccagaagtttgctaacaaaaatggtggatatatggcgaacataatcagaaaattcgcgtaaattatcactgatatgctcttgttgctcgtgggtaacggcaatcaaacttatcaccccaacacaacgatcctgtaaaatgacaggcgtacccagaaatgctttttcgcggcaattttctttactatcgcaaccttcgcaaaggggatcgaagcgagactgtgtcacaactttttcagttttcgtttccaggacgtggcggagcaggcgactgttgccgctcaactggcgaccaagaaacttcccatacgcgcccgttccggcaacgcgacacaagttttcatcaacgatctcaacctcaagctgcaaaaacgctggcaagcattctggcaaaacgctgaattgtcggttgaatttgcatcaatacactctgcgtagtagcaagctccatagctttaccttccagacttacttaaaagtcgatcattgaagacgttgatggttcacagatcatgatgatattaactcaggcgaaattggctttgataaaaacataagatttttatcattttctaatgaaattatggaagagatatcacatttctatatcaatatgagaattacggcggtgagtttatcaaactgaagagagatagcctgcccctttatcttatttctgatacttagcagcaaataaataacgcgataaaaaaagccaaacgttttcgtattttacaaacaaccagaagctggcatcaatttgtgatcaaccccacacattatccgtcaaattagtcttttgcagccgcgcggataattctggcacacttattgttagtcccaggtatagctgtgaaaacaccaatcactttggcaagtcacagtgaaataaaccactttgcctgtcattccactaccgggactttatgatgaaaactgttaatgagctgattaaggatatcaatagcctgacctctcaccttcacgagaaagattttttgttaacgtgggaacagacgccagatgaactgaaacaagtactggacgttgccgcagcattaaaagcactgcgtgctgaaaacatcagtaccaaagtctttaatagtggattaggtatttccgtattccgcgacaactccacccgtacccgcttctcttatgcttccgcgcttaacctgctcggccttgcacaacaagatctcgacgaaggcaaaagtcaaatcgctcacggcgaaaccgtgcgtgaaaccgccaatatgatctccttctgcgccgacgctattggtattcgcgacgatatgtatctgggcgcaggcaacgcctatatgcgtgaagttggcgctgcacttgatgacggttacaagcagggtgtactgccacagcgtccggctttagtgaacctgcaatgcgatattgaccacccgactcagagtatggctgacctcgcgtggttacgtgaacactttggtagtctggaaaacctgaaaggtaaaaaaatcgccatgacctgggcctactctccaagctatggcaaaccgctctctgtaccacaaggcatcatcggtctgatgactcgcttcggtatggatgtcaccctggcccatccggaaggctacgacctgatcccggatgtggttgaagtggcgaaaaacaatgctaaagcctccggtggtagcttccgtcaggtcaccagcatggaagaagccttcaaagacgcagacatcgtttatccgaagagttgggcaccttacaaagtgatggaagagcgtactgaattgctgcgtgcgaacgatcacgaaggcttaaaagcactggaaaaacagtgtctggcacagaacgcgcaacacaaagactggcattgtactgaagagatgatggaactgacccgtgatggcgaagccctgtacatgcactgcctgccagctgatatcagcggcgtatcctgtaaagaaggtgaagtgactgaaggcgtattcgaaaaataccgtatcgctacctacaaagaagccagctggaagccttatatcatcgccgcgatgatcctgtcccgtaaatacgccaaaccaggtgcactgctcgagcaactgctgaaagaagcgcaagaacgcgtgaaataacccctcgggccgatcagctggtcggccctctatttccagaggccaaaaggataggatatgtccgttttcagtttgaagattgatatcgccgataacaaatttttcaacggcgaaacaagtccgctctttagccaaagccaggccaaactggcgcgccagttccaccagaaaatagctggttatcgcccaacaccgctttgtgcgctggacgatctcgcaaacctttttggtgtgaagaaaattctcgtcaaagacgaaagtaaacgattcggtctgaacgccttcaaaatgcttggcggtgcgtacgccatcgctcaattattgtgtgaaaaatatcatcttgatatcgaaacgctgagttttgagcacctgaaaaatgccatcggcgaaaaaatgactttcgcgaccaccaccgacggcaaccacgggcgcggtgtggcgtgggcagcacagcaactcggacagaatgcggtgatttacatgccgaaaggttctgctcaggaacgcgttgacgccattctgaacctcggtgccgagtgcatcgtcacggatatgaactatgacgataccgttcgcctgaccatgcaacacgcgcagcagcacggctgggaagtggtacaggacacggcatgggaaggttacaccaaaatcccaacctggatcatgcaaggctacgcaaccctggcagatgaagccgtcgagcaaatgcgtgaaatgggcgtaaccccgacgcacgttctgctgcaagccggtgtcggagcaatggccggtggtgtgctgggttatctggtcgacgtctatagcccgcaaaatctgcacagcattattgttgaacctgacaaagctgactgtatttatcgctccggcgtcaaaggcgacatcgtcaacgttggcggtgatatggccaccatcatggcaggcctggcctgtggcgaacctaacccgctgggctgggaaatcctacgtaactgcgccacccaattcatctcctgccaggacagcgttgccgcattaggtatgcgcgtgctgggtaatccgtacggcaacgacccgcgcatcatctccggtgaatccggcgctgtcggtttgggcgttctcgcagcggttcattatcacccgcaacgtcaaagcctgatggaaaaactggcgctgaacaaagatgccgtggtgctggttatcagcactgaaggcgacaccgacgtgaagcactaccgcgaagttgtctgggaaggcaaacacgctgtagcaccttaatcaccctattggaactgctccctgcaaaacggggagtaaaaaatctggagaaaaataatggctaagaatattccattcaaactgattcttgaaaaagcaaaagattaccaggcggatatgactcgcttcctgcgcgacatggttgctattcccagtgaaagctgcgacgagaaacgcgtagtacatcgtattaaagaagagatggaaaaagtcggcttcgataaagttgaaatcgacccgatgggcaacgttctcggttatatcggccacggcccgcgtctggtggcaatggacgctcatatcgataccgtcggcattggcaacatcaaaaactgggacttcgatccgtacgaaggcatggaaactgatgaactgattggtggtcgcggtacttccgaccaggaaggtggcatggcctctatggtttatgccggtaaaatcattaaagacctcggtctggaagatgaatataccctgctggttaccggtacggtgcaggaagaagactgcgacggtctgtgctggcagtacattattgaacaatccggcattcgcccggaatttgtggtcagtaccgaaccaaccgactgccaggtataccgtggtcagcgcggtcgtatggaaattcgtattgatgttcagggtgttagctgccacggttctgcaccagaacgcggtgataacgccattttcaaaatgggtccgattcttggcgaattacaagaactctcccaacgtctgggttatgacgaattcctcggcaaaggcaccctcaccgtttctgaaatcttcttcacatccccaagccgttgcgctgtagcagacagctgcgcagttagtatcgaccgtcgtctgacccggggcgaaacctgggaaggcgcgctggacgaaatccgcgccctgcctgcagtacagaaagctaacgcggttgtttctatgtacaactacgaccgtccgtcctggactggcctggtttacccaaccgaatgctacttcccgacctggaaagtggaagaagatcacttcaccgttaaagcactggtgaatgcctacgaagggctgtttggcaaagcgccggttgttgataagtggaccttcagtactaacggcgtatctatcatgggccgtcacggcattccggtgatcggctttggcccgggtaaagaacctgaagcgcatgcacctaacgaaaaaacctggaaatctcacctggtgacctgtgccgcgatgtacgctgcaatcccgttaagctggctggcaacagagtaattactcttcacttattcccctccggttcgccggagggtttttggagtttgctatgcgcgtattgatcaaaaacggcactgtcgttaacgcagatggacaagccaaacaggatttgctgattgaaagcgggattgttcgccagttgggcaacaatattagcccgcagctcccgtatgaagaaattgatgccactggctgttacgttttccctggcggcgtggatgtccatacgcatttcaatattgatgtcggcatcgcgcgcagttgtgatgatttttttaccggtacccgcgcagctgcgtgtggcggtacaacaaccattattgaccatatgggatttggcccaaacggctgtcggttacgccatcaactggaggtttatcgtggttatgccgcccataaagcggtcatcgattacagctttcacggtgtgatccagcacattaatcacgcaatcctcgacgaaatcccgatgatagtcgaggaaggactgagcagttttaaactctatttaacctatcaatacaaactcaacgatgacgaggttttgcaggcattacgccgcttgcatgaatccggcgcgctgaccaccgtgcacccggaaaatgatgcggctatcgccagcaagcgggcggaatttatcgccgcagggttaaccgcgccgcgctatcatgccttgagtcgccctctggaatgcgaagcggaagccatcgcccgcatgattaacctggcacaaattgccggtaacgccccgctctatatcgtgcacctgtctaacggcttaggtctggattatctgcgtcttgcccgtgcgaatcaccagccagtctgggttgaaacctgcccacaatatctcctgttggacgaacgcagttacgatacagaagatggcatgaagttcattcttagcccaccgctgcgtaacgtacgcgagcaggacaaactgtggtgtggcatcagcgatggtgcgattgacgtggtggcaaccgatcactgcaccttcagcatggctcaacgcctgcaaatttctaaaggcgatttcagtcgctgcccaaatggcttacccggtgtggaaaaccgcatgcagttactgttttccagtggcgtgatgacgggacgtataacaccggaacgctttgttgaattaaccagcgcaatgcccgccaggttgtttggcctgtggccgcaaaaaggattattagcgcccggttccgacggcgacgtggtgattatcgacccacgtcagagccaacaaattcagcatcgccatctccacgacaacgccgactacagcccatgggagggttttacctgtcagggcgcgattgtcagaaccttatcccgtggtgaaacgattttctgtgacggcacctttacaggcaaagccgggcgaggtcgtttcctgcgacgcaaaccgtttgtccctcccgtgctctaaccactgccagggatctatacacaatcaagaatgatgagtgaggaaaaatgagtaagaaaattgttctcgccctgggcgggaatgcgctgggcgatgacctggccgggcaaatgaaagcggtaaaaattacttctcaggcaattgttgatttaattgcccagggacatgaagttatcgtcactcatggtaacgggccgcaggtgggcatgattaaccaggcctttgaagctgccgcaaaaactgaagcgcacagcccaatgctgccgatgtctgtctgtgttgcattaagccagggttatattggttacgatctacaaaacgctttaagagaagaactgctttctcggggcattaataaacctgtagcaacgctggttactcaggtcgaagtcgacgctaacgatccggcattcctcaacccgaccaagccgatcggtagcttctttaccgagcaagaagcagagcaactgacaaaacagggttacactctgaaagaagatgctggtcgcggctatcgccgtgttgttgccagcccaaaaccggttgatatcattgaaaaagaaacggttaaagctctggtagatgcaggtcaggtggtgatcaccgttggcggtggtggtatccctgttattcgtgaaggtaaccatctgcgtggtgccagcgcggttatcgataaagactgggccagcgcccgtttagcagaaatgattgatgccgatatgctgatcattctgactgcggtagaaaaagtggccattaacttcggtaaagagaatgaacagtggctcgatcgcctgagtttaagtgatgctgaacgctttatcgaagaaggtcattttgcgaaaggttctatgctgcctaaagtggaagctgccgccagctttgctcgctctcgcgcaggtcgtgaagcactgattaccgtattgagcaaagcgaaagaagggattgaaggcaaaacaggaacggtgatttgtcagtaatttaaaggccgggtgggtaataccatccggccaaagattgtcaagtaagtgcgctttgttgatgccggatgcggcgcgagcgccttatccgtcctacaaaacatcgcaaattcaatagattgcaatgcacttgtaggcctgataagcgtagcgcatcaggcaatttggcgtttgtcatcagtctcaggccgggtgggtaataccatccggccattttcatttaagccacttccagcacttcttttgtcgctttcacgccctgatgcatcaacatcattaacgcctcaagtacgccgccgccaatcgcccgggctttatcagaaacgctggtgaaatcagcggtttcaccacgaggatcgatatcaccaattttaaaaccaccaaccactgccaggccgtcgttcaacaagccacgcaccatccccgtcaacggtgctttaatttcatgctcaccaatccaggcaatcacatcgccctctttcaccagatcgcctaatttcacgttggatcgcataatgcctgcagcaggagcacggatcacccgtcgggtggtatgccccataatattgccaggaacaccggtattctcctgcgcacaaccagagtaaatcacctgaccgagccagtgcccgcgatttgtttcaattaccgcatgacaatccttcccagcagtaaagcccggcccaagcgcgattgttactggtgccatatctgcccgcgttcccaaattctgtttcgccagaatagcgtccaccacgcaaagcggtttcagttcatcaagcaaactacaggcgggatctaccatcacaggaatgaatccgcgttcggtaagtttcatcgcttccgcagagctggttgccaggcgagcagtgacgccttcgaccgtcatttcgccatcgaacacggcctgggcaaacgccacggtacaacgaatcactgtcggtttttccacttccagcatgatcactttaaaacccgcatgatacagacgtagcgccacaccactggcgatatctcccgcaccgcgaatcaccaccagctggtgtccggaaggatgagaaggtttcatcatcagcccacccggcgcgttatttttcacctgtaatatttctgccagcacgctgatggcgatctcctgcggcgtttccgcacctatgttgtaaccaacgggcgcatgtaaacgggcaatatgttcttcagccacgcctttctcacgcaattgacgcaggaaaagctgaaccttgcgacgacttgccagcaaccccaaccatgcaatgggctgttcaatgagtttgtcgagggcttcacgatcctgattattcgtggcaatcaggacaaaattatcagggcgaatatccagtgcttccactgccgcaccaaagctctcagcatggagaagcgtggtacttggtgggaatagttcaggattgaggctttcgcgataaatatcagcaacggcaatatcaaatcctaatagcgccgcactctgggctatcgcccggttgacatgccccgcgccaatcaacaccagacgtggacgcataccatggacgctgataaatacactcattgcacctccacaatcactcccgacagcatccgcaccgttacgagccatacgtccatggaataatcgcggcttacgttcctgcaatgcctgaaggctctcttcaatcaccttccgctcaaccattccgccaccaattgtaccgacgatagaaccatcggcgcgcactaacatttgtgcagaatggcggggagtgctgcctcggctatcaacaatttgcgccatagcaaacggacaattttgctcttcgagttttgcagcctctgtgaaaatattcataccaacctcaatggatatcctttcagtaacccggaatacccgggccgttaattcacaaatctgcgcgcgattgcaggatgttcttgtatatcgcccagccagattgcctctacgtcgtgttgttgcagcggttgaaggagctcgctttgtgcaatcgcattctcacattgagaaaaacggttaatgaaccagactcgccgacaaccttgcggtacgtttttaaacgccccctgagggtggcgaaccagcgcaacgagatcgctcagttgcaaggttgcatcaggtgttaacccggtaatatcagcaaactggctccagcgatggacattttctgtgctcactttcgcgcccaaagtatgtcctcccatcacagcaatcacgcagcaactgcttttgggtatgcaaggttcgtgctcatcaggcgcttttaacggcattccacggctgccatctgcttcaatgagaattacgtcacactctggtcgttgcaccagtgcatcaatcgcttctggcgtaaatccctgcacttttccctggttcgctttccagctgtgaaaacaaaaactaatgggggatgtaagagacgcatgaggaagcatggcgggatcacgacagaaaaccacgggccagtgagacgttggcataaacatatgtgtcgtcgtcgtgattaacacacgcctgccgctagcctggagcagttctgccagccaaaaaagcaagctggttttccccccagcaccaacaacagaaatcacagtgggacgtttctgcgcacctaaatcaatgactaatgcgcttgggtcaactatacttttcacgagtctttatgacctctctgggataaattatccccaacttaatccatcaggaagtaacgcaattatcaggcgttattagcccctataaataatggaaccactatgagtgccatcgactgtataattaccgctgccggattaagtagtagaatggggcaatggaaaatgatgttaccctgggaacagggaacaattcttgatacaagtatcaaaaatgcgttgcagttttgtagccgaattattttagtcaccggctatcgtggtaatgaactgcacgaacgttatgcgaaccagagcaatatcactattattcacaacccagattatgcgcagggtttactaacatccgtcaaggccgcagtacccgcagtgcaaacagaacattgttttctcacccacggtgacatgccaaccctcaccatcgatatttttagaaaaatctggagcttacgaaatgatggcgcaatactgccactccataatggcatccccggccatccgattttagtgagtaaaccatgcctgatgcaggcaatccaacgacccaatgtcaccaatatgcgtcaggcactccttatgggagatcattattccgtcgaaatagaaaatgcagaaataattttagatattgatactccggacgactttattacagcgaaggaaaggtatactgaaatttaaaaaacgtagttaaacgattgcgttcaaatatttaatccttccggcactcattatcataatgataaggaatcactgattttgagaaaagagaaaaattgataaatgggctggcaataataattttcaggagtgattttaattctcatttagcacctgtgagttcattcacaaaaagcccttaagtttcgagccgcctcacatttttttatatttcccgccaaacctggcaagagtggtgcgattgttgctctatccccctaaaccaccggatttctcaacaccggtcactcaatgatatctgtataagctaaggagagggttatgggggatattatgcgtcccattccgtttgaggaacttttgacgcgcatatttgatgaataccaacaacaacgcagtatctttggtattcccgagcaacagttttacagtcctgtaaaaggtaaaactgttagcgtcttcggtgaaacctgtgccactcccgtcggccctgccgctggcccgcacacgcagctcgcgcaaaatattgtcacttcctggctgactggcggacgcttcatcgaactaaaaaccgtccaaattcttgaccgcctggagctggaaaagccctgtatcgatgccgaagacgagtgctttaacaccgaatggtctaccgagtttaccctgcttaaagcctgggatgaatacctcaaagcctggtttgccctgcaccttctcgaagcgatgttccagccttctgattccggtaaaagcttcatctttaatatgagcgtcggttacaacctcgaaggtattaagcaaccgccgatgcaacagttcatcgacaatatgatggacgcatctgaccatccgaaattcgctcaatatcgcgatacgctgaataaattactccaggatgacgcatttttagctcgccacggattgcaggaaaaacgcgaaagcttgcaagccttacccgctcgcatccccaccagtatggtgcatggcgtcaccctctccaccatgcacggctgtcctccgcatgaaatcgaagccatttgccgctacatgctggaagaaaaagggctcaacacctttgtgaaacttaacccgaccttactggggtacgcgcgtgttcgtgagatcctcgatgtctgcggtttcggttacataggcttaaaagaagagagttttgatcacgacctcaagctgacgcaagcactggaaatgctggaacgcctgatggcactggcaaaagaaaaaagtctcggctttggcgtaaaactgactaacactctcggcaccatcaacaataaaggcgcactgcctggtgaagagatgtatatgagtggccgtgcgctgttcccgctctccatcaatgttgcagcagttctctctcgcgcctttgacggcaaactgcccatttcttattccggtggtgccagtcagctgactatccgcgatatttttgatacaggtattcgccctattactatggcaaccgacctgctgaaacctggcggctatctgcgcttaagtgcctgcatgcgcgagctggaaggctccgacgcctggggacttgaccatgttgacgtcgaacgactgaacagactggcagcagatgcgttaaccatggaatacacccagaaacactggaagccagaagagcgtattgaagtggcagaagacctgccgctgaccgactgctacgttgccccctgtgttactgcctgcgctatcaagcaagatattccggaatacatccgtctgcttggcgaacaccgctatgccgacgcgctggaactcatctaccaacgcaacgctctgcccgccattaccggtcatatttgcgatcaccagtgccaatacaactgtacccgcctggattacgacagtgcgctgaatatccgcgaactgaaaaaagtcgcgctggaaaaaggttgggatgaatataagcaacgctggcacaaaccagccggttctggtagtcgccatccggttgccgtgattggtgcaggtccggcgggtctggcagcaggttacttccttgccagagcgggccatccggttacgctgtttgaacgcgaagccaatgcgggcggcgtggtgaaaaatatcattcctcagttccgtattcctgcagagttaattcagcacgatatcgattttgttgccgctcacggcgtgaaatttgagtatggctgcagtcccgatttaaccattgagcagttaaaaaatcagggcttccactatgttctgattgccaccggcactgataaaaatagcggtgtgaaactggcgggcgacaaccaaaatgtctggaaaagtctccccttcctgcgtgaatacaacaagggtacagcgctcaagctgggcaaacatgtggtcgttgtcggggcgggtaacaccgcaatggactgcgctcgtgcggcgttacgcgttccaggcgtagaaaaagcaacgatcgtttaccgtcgtagtctacaagagatgcccgcatggcgcgaagagtatgaagaagcgttgcacgacggcgtagagttccgtttcctgaataatccggaacgtttcgatgctgatggcaccttaaccttgcgcgttatgagccttggcgaaccggatgagaaaggtcgtcgtcgtccggttgaaaccaatgaaacagtaacactgcttgtagacagcctgatcaccgccattggtgaacagcaggatactgaagccctgaatgcgatgggcgtgccgctggacaaaaacggctggccagacgtcgaccataatggcgaaactcgtctgactgacgtctttatgatcggcgacgtacagcgcggaccatcctccattgtcgctgctgtcggaaccgcgcgtcgggcgaccgatgccatccttagtcgggaaaatatccgttcccaccagaacgataaatactggaacaacgtcaatccagcggaaatctatcaacgtaaaggcgatatctctatcacgctggtgaacagtgacgatcgtgacgcgtttgtcgcccaggaagccgctcgctgcctcgaatgtaactacgtttgcagcaagtgtgtggatgtctgcccgaaccgcgccaacgtctccattgcggtcccaggcttccagaaccgtttccagacgctgcacctcgacgcttactgtaacgaatgcggcaactgcgctcagttctgtccgtggaacggtaaaccgtacaaagacaaaatcaccgtcttcagcctggcgcaagactttgataacagcagcaacccaggcttccttgtggaagattgccgggtacgagtacgtctgaataaccaaagctgggtgttaaacatcgacagcaaaggtcagtttaacaacgtaccaccggagctgaacgatatgtgccgcatcatcagccatgtccaccagcatcatcattatctgctgggccgcgtggaggtgtaatcatgttgattctgaagaatgtcactgcggtacagctacacccggcaaaagtgcaggaaggcgttgatatcgccatcgaaaacgatgtgattgtcgctatcggcgatgccctgacgcaacgctaccccgacgccagcttcaaagagatgcatggccggattgtgatgccagggattgtctgcagccacaaccatttttacagcgggctttcccgcggaattatggcaaacatcgcccctttgcccggatttcatcagtacgctgaaaaatctctggtggcggctcgatcgcgcccttgatgaagagagcctctattacagcggactgatttgttccctggaagcgattaagagcggatgtacaagcgttatcgatcaccatgcctctccggcgtatatcggcgggagactctccacattgcgcgacgcatttttaaaagttggcctgcgcgcgatgacctgttttgaaactactgaccgtaacaacggcatcaaagagttgcaggaaggtgtagaagaaaacatccgtttcgcccgtttgattgatgaggcgaagaaagcgacaagcgagccgtatctggtggaagcacatatcggtgctcacgcgccgtttaccgtgccggatgccggtctggagatgctgcgtgaagccgtgaaagccacaggccgtggtttgcatattcacgctgcggaagacctttacgacgtttcctacagtcaccactggtacggcaaagacctgctggcacgactggcgcaattcgatctcatcgacagcaaaacgctggtcgctcatgggctgtacttgagcaaagatgacatcaccctactcaatcagcgcgatgcgttcctggtgcataacgcccgtagtaacatgaacaaccatgtcggctacaaccatcaccttagcgacatccgcaatctggcgttgggaacggacggcattggtagcgacatgtttgaagagatgaaatttgccttctttaaacatcgcgatgcgggtggtccgctgtggcctgacagttttgccaaagccctgactaacggtaacgaactgatgagccgcaactttggcgcgaaatttgggcttctggaagccggttacaaagctgatttaaccatttgcgattacaacagcccgacgccgctgctggcagacaatatcgccgggcatatcgctttcggtatgggcagtggcagcgttcacagcgtgatggtcaatggtgtgatggtctatgaagaccgtcagtttaacttcgattgcgattccatttatgcacaagccagaaaagccgctgccagtatgtggcgtcggatggatgcgctggcataaatgacagatgccctcttcccgcagggaagagggttaaataaggaaagaagatgattgaacaatttttcaggcccgactctgtcgaacaggcgctggaactgaagcgccgctaccaggatgaagccgtctggttcgccgggggcagcaaactcaatgctacaccaacccgtaccgataaaaagattgccatttccttacaggatctggaactggactgggttgactgggataacggtgcactgcggattggcgcaatgtctcgcttgcagccactgcgtgatgcgcgatttattcctgcagcgctgcgtgaagccctcggttttgtttacagtcgccatgttcgtaatcagagcaccattggtggtgaaatcgccgcccgccaggaagagagcgtgctgcttcccgtcctgttggcactggatgctgaactggtttttggcaacggcgaaacgctgagtatcgaggactacctggcctgcccatgcgatcgcctgctaaccgaaattatcattaaagatccgtatcgcacctgtgcgacccgcaaaattagccgttctcaggcaggtttaaccgtcgtgacggcagccgttgcaatgacagaccacgacggtatgcgaattgcgctggatggcgtcgccagtaaagcactgcgtctgcatgatgtcgaaaaacaaaatctggaaggcaatgcacttgaacaggctgtcgccaacgccattttcccgcaggaagatttgcggggcagcgtggcctataaacgctatatcacgggagttctggtagccgacctgtatgccgactgccaacaggctggggaggaagccgtatgatcatccactttactttaaatggcgcgcctcaggagctaaccgttaatccaggcgaaaacgtgcaaaagctgttgtttaacatgggaatgcactctgtacgcaacagtgatgatggtttcgggtttgccggttctgacgcaataatctttaacggtaatatcgttaacgcgtccttgcttattgccgcacagttagagaaggcagatattcgtaccgcagaatctctgggcaaatggaacgagttaagtctggttcaacaggcaatggttgatgttggcgtggtgcagtctggttataacgatccagctgcagctctgattatcaccgatcttctcgatcgcatcgccgcacctacccgcgaagagatcgacgacgcgctttctggtttgttcagccgcgatgctggctggcagcaatactatcaggtcattgaactggcggttgcacgtaaaaataatccgcaggccaccattgatatcgctccgactttccgtgacgacctagaagtcattggtaagcattatcctaaaactgatgccgcgaaaatggtgcaggcgaaaccctgctatgttgaagaccgcgtaacggctgacgcctgcgtcattaaaatgttacgtagcccacacgctcacgcactgattactcatctggatgtcagcaaagctgaagccttaccgggcgtcgttcacgttattactcacctgaattgcccggatatctactataccccgggtggtcagagcgcaccggaaccgagtccgcttgaccgccgtatgttcggcaagaaaatgcgtcacgtcggcgatcgtgttgctgcggtcgtcgcagaaagtgaagaaattgcgctcgaagcactgaagctcatcgacgttgaatatgaagtgcttaagccggtaatgagcatcgacgaagcaatggcggaagatgcgcctgtcgtgcacgatgaaccggtggtgtatgttgctggtgcgccagatactctggaagacgataacagccatgcagcccagcgcggcgagcatatgatcatcaacttcccgatcggttctcgccctcgcaaaaatatcgccgccagtattcatggtcatattggcgatatggacaaaggctttgccgatgccgatgtgatcattgagcgaacctataacagtacgcaagcgcagcagtgcccgactgaaacacatatctgctttactcgtatggacggcgatcgtctggttatccacgcctccacccaggtaccatggcacttacgccgccaggtcgcgcgcctcgtgggcatgaaacagcataaagttcatgtcattaaagagcgagttggcggcggttttggttccaaacaggacatcctgctggaagaagtgtgcgcctgggcaacctgcgtgaccgggcgtccggtactgttccgctacacccgtgaagaagagtttattgctaacacctctcgtcacgtcgcgaaagtcaccgtcaaactgggagcgaaaaaagatggtcgcctgacggcagtgaagatggatttccgcgccaacactggcccttacggcaaccacagtctcaccgtaccgtgtaacggaccggcgctgagcctgccgttatatccgtgcgataacgtcgatttccaggtcaccacctactacagcaacatttgcccaaatggtgcttatcagggttatggcgcaccgaaaggtaacttcgctatcaccatggcattagcggaactggctgaacagttacagatcgaccaactggaaattatcgaacgtaaccgggtacacgaagggcaagagctgaaaattctcggtgcaatcggtgaaggtaaagcgccgacctccgttccttccgccgccagctgtgcactggaagagatcctgcgtcagggtcgcgagatgatccaatggagcagtccgaaaccgcaaaatggtgactggcacatcggtcgcggcgtcgccattatcatgcagaaaagcggtatcccggatatcgatcaggctaactgcatgatcaaactggaaagcgacggcacctttatcgttcattctggcggtgcggatattggtactggtctggatactgtagtgacgaaactggcagcagaagtgctgcactgcccaccgcaggacgtgcatgttatctccggtgataccgatcatgcgttgtttgataaaggcgcatatgccagctccggtacttgcttcagcggtaacgcggcgcgtttggcagcggaaaatctacgggagaaaattctgttccacggcgcgcaaatgttgggtgagccagtggcagatgttcaactggcaacgccgggcgtcgtgcgcggcaagaaaggcgaagttagtttcggggatattgcccataaaggcgaaaccggcaccggctttggtagtctggtgggaactggcagttatatcacgcctgatttcgccttcccgtatggcgcaaacttcgctgaagttgccgtcaacacgcgtacgggtgaaatccgcctggataaattctacgccttgctggactgcggtacaccggtcaatccagagttagcgttgggacaaatctacggtgccaccctgcgtgctatcggccacagtatgagcgaagagatcatttatgacgccgaaggtcacccgttaacgcgtgatttacgcagttacggcgcaccgaaaattggtgacattccgcgtgatttccgcgctgtgctggtgccgagcgacgataaagtcggcccgttcggggcgaaaagcatcagcgaaatcggtgtaaatggcgcagctccggcgattgctaccgcaattcacgatgcatgcggcatctggttacgcgaatggcatttcacaccggagaaaatactcactgcgctggaaaaaatataaataataaatggccgcttcggcggcctgtttctctgtttgaacgatgactaaatagtgactgcgaaaatgagataagccgttctcaaggcgtcctgcgccccaaattcgtgggaatttattttactaattcagatgatcaaatttactttaaaaggagtgaagggatgtctgatataaaccatgcaggttctgaccttatatttgaactggaggatcgccctccctttcatcaggctctcgttggtgccattacccatctgttggcaattttcgttccgatggtaacccccgcgttaatcgtgggtgcggccttacagctttccgctgaaacaactgcctatcttgtttctatggcgatgatcgcctctggtattggtacctggttacaagtaaaccgctacggcatcgtcggttctggcctactcagtattcagagtgtcaattttagttttgttacggtcatgattgcgctgggcagcagcatgaaaagcgacggttttcacgaagagttaatcatgagcagccttctcggcgtctccttcgttggcgcatttctggttgtcggatctagttttatcttgccctatttacgtcgggttattacgcctaccgtcagcggtattgtggtactgatgatcggcttaagcctgattaaagtcggcattatcgattttggtggaggatttgcagccaaaagcagcggtacgttcggcaattacgaacatctcggcgttggtttattggttttaattgtggtgatcggctttaactgctgtcgcagtccgttgctacgcatgggagggatcgccattgggctatgtgtcggctatatcgcaagcttatgcctgggcatggtggatttcagcagtatgcgcaatttgccgttaatcaccatcccgcatccgttcaaatacggctttagttttagcttccatcagttcctggtggttggcacgatttatctgcttagcgtgctggaagcagtcggcgatatcaccgccacggcaatggtttcccgccgccccattcagggggaagagtatcagtcccggctgaaaggcggcgtgctggcagatggtctggtttctgttatcgcctccgctgtcggtagtttaccattaaccacgtttgcgcaaaataatggggttattcagatgactggcgtcgctagtcgttatgtcgggcgaaccatcgcggtaatgctggttatcctcggcttatttccgatgattggcggcttcttcacgaccattcccagcgcagttctgggaggcgcaatgacgttgatgttttccatgattgccatcgcagggattcgcatcatcatcaccaacggtttaaagcgccgtgaaacacttattgtcgccacttctttaggtttagggcttggcgtctcctacgatcccgaaatttttaaaatattgccagcctctatttatgtattagttgaaaaccctatttgtgctggcgggttaactgcgattttattaaatattatcctccctggtggctaccgacaggaaaacgttctgcctggtattaccagtgcggaagagatggattaacagtaaaggagtcaatgatgagtggagaacacacgttaaaagcggtacgaggcagttttattgatgtcacccgtacgatcgataacccggaagagattgcctctgcgctgcggtttattgaggatggtttattactcattaaacagggaaaagtggaatggtttggcgaatgggaaaacggaaagcatcaaattcctgacaccattcgcgtgcgcgactatcgcggcaaactgatagtaccgggctttgtcgatacacatatccattatccgcaaagtgaaatggtgggggcctatggtgagcaattgctggagtggttgaataaacacaccttccctactgaacgtcgttatgaggatttagagtacgcccgcgaaatgagcgcgttcttcatcaagcagcttttacgtaacggaaccaccacggcgctggtgtttggcactgttcatccgcaatctgttgatgcgctgtttgaagccgccagtcatatcaatatgcgtatgattgccggtaaggtgatgatggaccgcaacgcaccggattatctgctcgacactgccgaaagcagctatcaccaaagcaaagaactgatcgaacgctggcacaaaaatggtcgtctgctatatgcgattacgccacgcttcgccccgaccagttctcctgaacagatggcgatggcgcaacgcctgaaagaagaatatccggatacgtgggtacatacccatctctgtgaaaacaaagatgaaattgcctgggtgaaaagcctttatcctgaccatgatggttatctggatgtttaccatcagtacggcctgaccggtaaaaactgtgtctttgctcactgcgtccatctcgaagaaaaagagtgggatcgtctcagcgaaaccaaatccagcattgctttctgtccgacctccaacctttacctcggcagcggcttattcaacttgaaaaaagcatggcagaagaaagttaaagtgggcatgggaacggatatcggtgccggaaccactttcaacatgctgcaaacgctgaacgaagcctacaaagtattgcaattacaaggctatcgcctcagcgcatatgaagcgttttacctggccacgctcggcggagcgaaatctctgggccttgacgatttgattggcaactttttacctggcaaagaggctgatttcgtggtgatggaacccaccgccactccgctacagcagctgcgctatgacaactctgtttctttagtcgacaaattgttcgtgatgatgacgttgggcgatgaccgtagcatctaccgcacctacgttgatggtcgtctggtgtacgaacgcaactaataataaaactttaacatcctcgtgaggacatcattatgtctggagacatcctacaaacaccggacgcaccaaagccacagggcgcgctggataattattttaaaattaccgctcgtggcagtaccgttcgtcaggaagtactggctggcttaacgacctttctggccatggtttattccgttatcgtcgttccgggaatgctgggcaaagcaggttttcctcccgcagctgtgtttgttgccacctgtctggtcgcgggcttcggcagcttgctgatgggattatgggctaatttgccaatggcgattggttgcgcgatttccttgacggcgtttaccgcattcagtctggtactcgggcaacaaattagcgttcctgtcgcactgggcgcggtatttctgatgggcgtcatcttcaccgccatttccgtaaccggtgtgcgtacctggatcttacgtaatttgccgatgggtatcgctcacggtacaggtatcggtatcgggctgtttctgctgctgattgctgctaacggtgtgggtatggttatcaaaaacccgattgaaggcttgccagtggcgctcggtgcgtttacctccttcccggtgatgatgagcttgctggggctggcggtcatcttcggcctggagaagtgtcgcgtacccggcgggatcttgttggtgattattgcaattagcatcatcggcttaatctttgacccagcggtgaaataccacggtctggtggcgatgccaagcctgactggcgaagatggtaagtctctgattttcagcctcgatattatgggtgcactccagccaactgtacttccgagtgtactggcattggtgatgaccgcagtgttcgacgctactggcaccatccgtgccgtcgccggtcaggcgaatttgttggataaagacaaccagatcatcaacggcggcaaagccctgaccagtgacagtgtaagtagtatattctccggcctggtgggcgcagcgcccgcagcggtttatatcgaaagtgcggcaggaaccgccgccgggggtaaaacaggtttaaccgcaaccgtagtgggggcgttattcctgttaattctgtttttaagtccgctgagttttttgatccctggttacgccactgcacccgctctgatgtacgtaggtttgctgatgttaagtaacgtcagcaagctggatttcaatgattttattgacgctatggctggcctggtgtgtgccgtgttcatcgttctgacttgtaatatcgttaccggtattatgctgggctttgtgacactggtcgtaggccgcgtctttgcacgcgaatggcaaaagctgaatattggtacggtgatcattactgccgcactggtcgcattttacgcgggtggttgggcaatctaatagattctccgcgcctttcagcgcggagatttctttcagagaggattctcaccgctggcaacaatacgctgctggcggactcgcctgagttctctttcagtaagcaactgcagcgcctgtgttgggcaagattcaacgcaggctggcccctcttcccgctgttcacagagatcgcatttcacaatttgttgtcgggtatcccccggcaagctctgaatggtgatcattccaaacgggcacgcactgacgcaactctgacagccaatacaacgggcagaattggtctgcaccacctgctcgcccatcgtcagcgcccccacggggcaagcgccaacacaaggggcgttttcacactgatggcacatcaccggcgcactgatgctgtccagtcgctgtaccttcagccggggtaaaaagacatcggcattcaactcctgttcactagggtgagcgaccacacaggctacttcacaagtacggcagccaatacagtcagccggattaacgataattaagcttttcatcagcttgccttcgtatcaaacagagttaacatatcgcgcgccgcctgccttcctgcggccattgcagtgacaaccagatccgcgccatgaactgcatcaccaccagcaaagacttttttcagatgcgtctgggtaggtaaatacccgacgtcaccggtttgaatcaggccccatttatcgagtttaattccgctgccctgcaaccacggcatggcatgcgcctggaaaccaaaggccataatcagaacatcggcgggcaattcaaactcactacccgctaccggacgaggacgacggcgaccatccggccccggctcacccatggcggtacgaatcaggcccaccgcagttaaacgcccatcttcgtcacaagcgatatattgcggttgaacattgaactgaaactcgacaccttcctcgcgcgcattaaccacctctttgcggctgcccggcatactgacttcatcacgacgatacgcgcaggtcacgctggcggcattgaggcggatggaagtccgcaaacaatccattgtcgtatcgccaccgcccaataccacgactcgcttaccttccacgtccgtcagcggatactcttcagactccggcaatcccatgagctggcgggtatgggcagtcaggaacggtagagcctgaatgacaccgggcgcatcttcatgcggcagatctgctcgcatcatcccgtaagtccccacgccgatgaaaactgcatcatattcagaagttaaatcgctaaaggtaatatcgcggccaatttcacagttaagatgaaagtcgattcccattgcggtgaatatctctcgccgctggcttaataccgttttatcgagtttgaaaggaggaatgccaaaagtcagcataccgccaatttctggatggcgatcaaagacatcgacctgaactcctgcgcgcgccagaatatcagcacaccctaaccctgcaggcccagcgccaatcaccgccactttttcgctacggggaacaactttgctgacatcgggacgccaacccatcgccagcgcggtatcggtgatgtagcgttccagattaccgatagagactgcgccgctgtgatctttcaaagtacatgcgccttcacaaagacggtcctgtggacataccctgccgcaaatttctggtaaggaactggtctggtggcaaagttctgccgcttcaataatctttccttcctgtaccagacggatgtaatccggaatagcgttatgcagcgggcaatgccagttgcagttagctttttcggcacaataaacacagcggtcactctcataagtcgcttgttgtggatccagcccgcaatatatttcgccaaagtgggttttccgttcactcgcactaattttatctgcgcctttacggctgttaacggggagcaacgctgcactgcgagatggctgagcgtcactactcgcttttcctgctgccgttttgcgctggcgggccacctttatctgctgcaaccctttatcgtccatcagtcgtaacgcctgtgttgggcaaacttcaatacaggcttgcgtgccggaactgcgctggttacaaaggtcgcatttctgcgcaatcgtatcgaccatctcaacgacgccaaaggggcaagcgattgcgcatcttttacaaccaatacatttttgctcgtccagttgtacgctatcggactggaaagtcagagcattaaccggacaagccgtaacgcaaggggcattgttgcagtgatggcaggccaccggattcgcagcctggcctttccctacaacgtggatacgcggtcgaaagtcactgtgactcagcggccagttttcttgattgtgtgccaccgcacaggcaatttcacaagcatgacagcctatacattccgcagcttcagcagcaataaacttattcatttgcatccctttcatttaatgagttatgtcttctcaaatttcgcgatgcaataaacgggcatatattaggtagcatgaccgttttaattataattttgcgactgagttcaaattattgcccctcaatctatgccgctttcattatttcaacattgccgatcaaaagagcgctatccagataaaaacgattaaatgcgagagtgcgacatgccagaatgattaatgaaatatcaatatgagaaaattacagataattccattgtcaggttctcttctcattttcgtggtttaaccacgattatgtgattgcctccgcaattcctgtctctaactccccttcctcgcaaaaactggcactccacgagcatgtgtttagacagtttcattaacgtaaacggttgctttttactctggcgggcgaaaggagaaacactgatgagcgccatagattcccaacttcccagttcttctgggcaagaccgcccaactgatgaggttgaccgcatattaagtccaggaaagctgatcatactcggtctgcaacacgtccttgtcatgtacgcaggtgcagtcgctgttcctcttatgattggtgaccgactgggcctcagtaaagaagctattgcgatgctcattagcagcgatctcttttgctgcgggatcgtcacattattgcaatgtatcggtatcggccgctttatggggatccgcctgccggtgattatgagcgtgacctttgctgctgtaacaccaatgatagccattgggatgaacccggatatcggcctgctggggatatttggtgccactatcgccgcgggttttatcaccacattattagcgccacttatcggtcgcttgatgcctttattcccgccactggttaccggtgtggttattacttctatcgggcttagcatcattcaggtgggtattgactgggccgccggaggtaaagggaatccgcaatatggtaatcccgtttatttaggtatctcctttgccgtcttaatttttatcttgctcattactcgctatgcgaaaggatttatgtccaacgtcgccgtattactggggattgtatttggctttttacttagctggatgatgaatgaagtcaatttatccgggctacatgatgctagttggtttgcgattgttacgccgatgagctttggtatgccgattttcgatcccgtttccattctgaccatgactgccgtgttaatcatcgtgtttatcgagagtatggggatgttcctggcactgggtgaaatagtcggtcgtaaactctctagccacgatattattcgcgggctgcgtgtcgatggcgtagggacaatgataggcggcacgtttaacagcttcccccacacgagtttttctcaaaacgttggcctggttagcgtgacgcgcgttcatagccgctgggtgtgtatttctagcggaattatattaatcctgtttggcatggtgccaaaaatggcggtgctggtagcctccattccgcaatttgtgctgggcggcgctggtctagtgatgttcggcatggtactggcgacagggattcgaattctgagccgctgtaactacaccaccaaccgttacaacctctatattgtggcgatcagtctcggcgttggcatgactccgacgctctctcacgatttcttttctaagttaccggccgtactgcaaccgctgctacatagcggcattatgctcgcaacccttagcgccgttgtgctgaacgtcttctttaatggctatcagcatcatgctgacctggtgaaggaatccgtctctgataaagatttaaaagtcaggacagtacgtatgtggcttctgatgcgcaagctgaagaaaaatgagcatggagaataatatgaattttttaatgcgcgctatattcagtctgttgttgctttttactctctctattcctgtcatttctgactgtgttgcaatggccattgaaagtcgcttcaaatatatgatgctacttttttaaatggtttttacctgtcggcatccgctcaaaacgggcggttgtcgataaacgctcacttggttaatcatttcactcttcaattatctataatgatgagtgatcagaattacatgtgagaaattatgcaaacggaacacgtcattttattgaatgcacagggagttcccacgggtacgctggaaaagtatgccgcacacacggcagacacccgcttacatctcgcgttctccagttggctgtttaatgccaaaggacaattattagttacccgccgcgcactgagcaaaaaagcatggcctggcgtgtggactaacagcgtttgtgggcacccacaactgggagaaagcaacgaagacgcagtgatccgccgttgccgttatgagcttggcgtggaaattacgcctcctgaatctatctatcctgactttcgctaccgcgccaccgatccgagtggcattgtggaaaatgaagtgtgtccggtatttgccgcacgcaccactagtgcgttacagatcaatgatgatgaagtgatggattatcaatggtgtgatttagcagatgtattacacggtattgatgccacgccgtgggcgttcagtccgtggatggtgatgcaggcgacaaatcgcgaagccagaaaacgattatctgcatttacccagcttaaataaaaaaaccccgacatttgccggggttgtgagcataacgtaatgcttattttaccggacgcatcgccgggaacagaataacgtcgcggatggtatggctgttggtgaacagcattaccatacggtcgataccaattcccagacctgctgtcggcggtaagccatgttccagtgcggtgacgtaatcttcatcgtagaacatcgcttcgtcgtcacctgcgtctttcgcggcaacctgatccaggaagcgttgcgcctgatcttccgcgtcattcagctcgctaaagccgttaccgatttcacgaccaccaatgaagaactcaaagcggtctgtgatttccgggttaacgtcgttacgacgcgccagcggagaaacttctgccggatattcagtaatgaaggtcggctgaatcagatgtgcttctgccacttcttcgaagatctcggtaacgatacggcccagaccccagctcttctcaacgtggatgccgatagattcagcaattgctttcgcagagtcgaagttgtccagatccgccatgtcggtttccgggcgatatttcttgatcgcttcacgcatggtcagtttttcgaacggtttaccgaagtccagcgtcacgtcgccgtaggtcacttccgtcttaccgagaatatcctgtgccagagtacggaacaggctttcggtcagctcgatcagatctttgtaatctgcgtaagccatgtagagttccatcatggtgaactctgggttatgacgtacggaaataccttcgttacggaagttacggttgatttcgaatacacgctcgaagccaccaaccaccagacgcttgaggtacagttccggcgcgatacgcaggtacatgtcgagatccagcgcgttatggtgggtgataaacggacgcgcagcggcaccgccagggatcacctgcatcatcggcgtttcaacttccataaagccgcggttcaccatgaactggcgaataccagagaggatctggctgcgcactttaaaggtgttgcgggattcatcgttggagatgagatcgagataacgctgacgatagcgcgcttcctgatcctgcaagccgtggaatttatccggcagcggacgcagtgctttggtcagcagacgcaactcggtgcagtggatagacagttcgccggttttggttttgaacagcttacctttcgcgccgaggatgtcgccgaggtcccattttttgaactgctcgttataaacgccttccgggagatcgtcacgggcaacgtacagctgaatgcgaccgccaacgtcctgcagggtaacgaaagacgctttacccataatacgacgggtcatcatgcggccagcaacggcgacttcgatgttcagcgcttccagttcttcgttctctttgccgtcgaattctgcgtgcaattggtcagaggtatgatcgcgacggaaatcgttcgggaaggcaatcccctgctcgcgcaggttcgccagcttctcacgacgcgttttcagttcattgttaagatcgactaccgcgtcagcgccctgtgcgtgttgttcagacatgttggttcctcataaccctgctttcaaacttgcttcgataaattgatccaggctgccgtccagcacggcctgcgtgttgcgggtttctaccccggtgcgcagatctttaatgcgggagtcatcaaggacataagaacgaatctggctgccccagccgatgtcggatttgttatcttccatcgcctgtttctcggcatttttcttctgcatctccagttcataaagcttcgctttcatctgcttcatggcctgatctttgttcttgtgctgggaacggtcgttctggcactgggtcacgatcccggtcgggatgtgggtaatacgcaccgcagattcggtacggttaacgtgctgaccgcccgcgccggacgtgcgataaacgtcaatgcgcagatccgccgggttgatttcgatatcaatatcatcatcaacttccggataaacaaacgcggagctgaagctcgtgtggcgacgaccgccggagtcaaacgggcttttacgcaccaggcggtgaacgccggtttctgtacgcagccagccgtaagcgtaatcgccggagattttgatcgtcacggatttaatacccgccacttcaccttcgctctcttcgatgatttcagttttgaaaccacggctttctgcccagcgcagatacatacgctcaagcatgctcgcccagtcctgtgcttccgtaccgccagaccccgcctgaatatcgaggtagcagtcggcgctgtcatattcgccagagaacatacggcggaactcaagctgcgccagtttttcttccagggcgtcgagttcagcaacggcttcgttaaaggtttcttcgtcgtcagcttctacagccagttccagcagaccagaaacatcttccagcccctgtttcatttggtcgagggtgtcgacaacggcttcgagggaggaacgctctttacccagcgcctgtgcgcgttcgggttcgttccagacatccggctgttccagctcggcgtttacttcttccagacgctctttcttggcgtcgtagtcaaagataccccctaagaacgtcggagcgttccgtgaggtcctgaatgcgattatttaccggattaatttcaaacatggtctgatttcttttattgagctagtcaaaatgcggtgataagagcgggattgtacccaatccacgctcttttttatagagaagatgacgttaaattggccagatattgtcgatgataatttgcaggctgcggttgccgcgaaactcgttgatatcgagcttataagccagttgcacttcgcgcacgccgttatccggccagagggcggtatcgacattaaaagcaataccatccagcagtggaccgccgccgaccggttcgaccatcaccttcaaatgacgttcgcccaccagccgctgttgcagcagacggaaatgaccgtcaaacagcggctccgggaacatctgcccccacgggccagcatcgcgcagcagctgcgccacttccatggtcatttcggccgggcttaacggaccgtcacttaccacttcgccttgcaataggctagggtccagccactcagtaaccagttcgccaaaccgttgttgaaagagtttgaatttatcctcttccaggctcaaacccgccgccatcgcatgaccgccaaacttcagcatcatgccagggtagagtgtgtctaatcgctccagcgcatcacgcatatgcagcccctgaatggagcgaccggaacctttcagcgtaccgtcacctgctggcgcaaacgcgataaccggacggtgaaaacgctctttgatgcggctagccagaataccgacaacgccctgatgccattcggggtgatacattgccagcccgccgggtagcgtgtcacggctgcgctccagtttctcgcacagggtcagggcttcaatttgcattccttgttcgatctcttttcgcgtctggtttagcgcatcgagttcatttgccagcacgcgcgcttcgccgatgttgtcgcacaacaacagcgccacaccgacggacatatcgtccagtcgtccggcagcattgagacgtggccccagcgcaaaacctaaatcgctggcggcgagtttttgtgcatcacggtttgccacttcaagcagcgctttaatccccggacggcactttccggctcggatgcgactcatcccctgccaggtcagaatgcgattattagcgtccagcggcacgacgtccgccactgtccccagcgcgaccagatccagcagttctgccaggttaggaattgcgatgttacgctcatcaaaccagccctgatcgcgcaaaaaggtgcgcagcgccagcatcagataaaacgccacacccacgcctgccagacttttgctcgggaaattacagtcgcgcaagttagggttaatgatcgcttccgctgcgggtaatgtgtcgcctggcaaatggtgatcggtaacaataaccgggatgcccaagctgcgagcgtgctcaacccccgcatgggaggaaataccgttatccaccgtgacaattaactgcgcgccacgggcatgggcctgatcgaccacttccgggcttaagccgtaaccgtcttcgaaacggtttggtaccaggtagtcgatattgctgcaaccaaggctgcgcatcgccagcacgcttagagccgtgctggtcgcgccgtcggcgtcgaaatcaccgaccacaataatccgcgttccttcgcgaaaagcgttgtaaaggatctcaacggccttttcgacgccgctcagttgctgccagggcagcatacctttaacactgcgttccagttcttgcgcactgcgtactccccggctggcgtataaacggcgcagcaagggaggcaattcagcgggcaagtctgccgtttcatcgacttcacggcgacgaagttgtatctgttgtttcacgcgaattatttaccgctggtcattttttggtgttcgtcgaggaattctttcatctctttcggcggctggtaacccggaacaagtgtgccattgctcagcacaactgccggagtaccgctaacgccaagctggacgccaagtgcgtaatggtcggcaatatccacgtcgcaactggctggtgcgacgcttttacctgccatcacatcatcaaacgctttgtttttatctttcgcacaccagatagctttcatttctttctctgcatcgctgtccagcccctggcgcgggaaagcaagataacgcacggtgatccccagcgcgttgtagtctgccatttgctcatgcagtttgtggcagtaaccacaggtaatatcagtaaacacggtgatgacgtgtttttcctgcggcgctttataaacgatcatctctttttcaagcgcattcaactgctttaacagcatcttattggtgacattgaccggagccgtgccactaacgtcatacattggcccctgaatgatatgtttaccatcatcggtgatgtacaacacgccgctgttagtcagaactgtcttcatgccagctacaggcgcgggctgaatatcgctgcttttgatgcccattttggctaacgtttgttgaattgccgcgtcatcagcctgagcaaagccactaaacgccgctaacaaagtaaacaacataaaacctttcttcataaatcttcccgttcttttcagacatcacgcccgcgggtgatgctgttgatgaagttgccgcagacgctcggtagcgacatgcgtataaatttgcgtggtggagagatcgctgtggcccagtagcatctgcaccacgcgtaaatccgcaccatgatttaataaatgagtggcaaaagcgtgacgcaacacatgcggactcagcttttcgctgtcgatacccgccagcacagcataatgtttaatacggtgccagaaggtctgtcgcgtcatctgctgcgcacgctggctgggaaacaacacgtcaatactcacaccattcagcagccacggacgcccatgttccagataggtttccagccagtaaaccgcctcttcacctaacggcaccagacgctctttgttgcctttaccaatgacccgtaccacgccctgacgcaggctgatatcactcattgtcagtccgaccagttcagagacacgcagcccggtagcatacaacacttcaagcatggctttatcgcgtagctccagtggctgatcgattaatggtgcctgtaataaacgttcgacctgcgcttcgcttaaatcttttggcaaacgctggggcaatttcggactagcgagatgcgcactgggatcgtcttcacgaaacttttcgcgataaagatactggaacaatcggcgcactgcactcagcaaacgcgcactgctggtggctttatacccgccctccagccgttctgccagtaatgcctgcaaatcgtcactttgcgccgtcgccagcgtcaacccgcggtgatgcaaccactccaccatcatactcagatcgcgacggtaagcgttcaacgtattttcagccagatttttttccagccacagagcatcaagaaactgctcgatgcgtgccagatcctgtttcacttgcgccccttatggtcactcatttgatccattatgccttattgtgccgtgactaaagcgattctgatacactagccgcaaaagccacagcagaatcgagaagcttacgttatgaatatgggtcttttttacggttccagcacctgttacaccgaaatggcggcagaaaaaatccgcgatattatcggcccagaactggtgaccttacataacctcaaggacgactccccgaaattaatggagcagtacgatgtgctcattctgggtatcccgacctgggattttggtgaaatccaggaagactgggaagccgtctgggatcagctcgacgacctgaaccttgaaggtaaaattgttgcgctgtatgggcttggcgatcaactgggatacggcgagtggttcctcgatgcgctcggtatgctgcatgacaaactcagcaccaaaggcgtgaagttcgtcggctactggccaacggaaggatatgaatttaccagcccgaaaccggtgattgctgacgggcaactgttcgtgggtctggcgctggatgaaactaaccagtatgaccttagcgacgagcgtattcagagctggtgcgagcaaatcctcaacgaaatggcagagcattacgcctgatctcactgacggcttagcgcatatgctttgccgtcatctttatctttgcgtctcttgttgcaacaaaatccgccgtaaatcccgccattcagcttcgtccatgctgtcggctgccagccataaatgttgccgtttaccgccatcagaacgtaaacgcagcatcatgccgctcttaatcatccacggtgctttgacgatgctccactcctgcccttgccaacgcaaacgcccgtccatcaacaagcgaatttccccctggcgagcattaatacgccgctggctgcgaacgcaatcaaacaccaccaggctaagtaacaccatccataacggggtgtaactgagtggccagggcatgagtaaaataacagcggcaaccagcccatgaatcagcaaggaaagccactgtgcgcgccaggagacgcgcaaatcagattgccacaggaccacgttcccggttccgtgtctggatgagtcggaccatcatttccagttctgcatcggccggtttaccgtgattcatcagccagttaaacaggtccggatcgtcacattccagcagacgaataaagatgcgtttttcgtcatcgcttaagctgtcgtactcatgttcgaaaaacggcatgatactaatatcgagttcgcgcataccacggcggcatgcccaatgaatgcgggctttgttgttaatgtccatcttcttcctgtctcacgaaaatccagtacccggctattgtaacgtgtttttcgccttcttttacgggaatatcagtaaacaccatcgcgatcgcgaaattaattcacaacaattcaatggcttcatttttttggaagtcgcctcgcagaaggcacagatcgcgtagtgaaagcacttgcattgcctcatagctcttttaccattagtcattaatacgccgttaagcaactcaggactctattatggcttttacaccttttcctccccgtcagcctacggcttctgcccgtttaccgctgacgctgatgacgcttgatgactgggcgcttgccaccattactggcgcggacagcgaaaaatatatgcagggtcaggtgacagcagatgtcagccagatggcagaagatcagcacctgctcgccgcccattgcgacgccaaaggtaaaatgtggagcaatttacgtctgttccgcgacggcgatggctttgcatggattgaacggcgcagcgtgcgtgaaccgcagctgactgaactgaaaaaatatgcggtattctctaaagtgaccatcgcgccagacgacgagcgtgtgctgcttggtgttgccggttttcaggcgcgcgccgcgctggcaaatctctttagcgaactgcctagcaaagaaaaacaggtagtcaaagaaggcgcgaccactttgctatggtttgaacacccggcagaacgtttcctgatcgtaaccgatgaagctactgctaatatgctgaccgataaactgcgcggtgaagcggaactgaacaatagccaacagtggctggcattaaacattgaagcgggtttcccggtgattgatgccgccaacagcgggcagtttatcccacaggcgaccaatctccaggcgctgggcggtatcagctttaagaaaggctgttataccggacaagagatggtggcgcgagcaaaattccgtggtgccaataaacgtgcgctctggttgctggcaggtagcgccagccgactgccggaagctggtgaagacttagagctgaaaatgggcgagaactggcgtcgtaccggtacggtactggctgcggtaaaactggaagatggtcaggtcgtggtacaggtcgtcatgaataacgatatggaaccggatagcatcttccgcgtacgcgacgatgcgaatacattgcatatcgagccgctgccgtatagcctcgaagagtaaatctctttatcgcatcaggcatttatcgcctgatgcgacgctggcgcgtcttatcatgtctgggatttgatgcctttatcacaacagggacgaggcccgtagatcggataaggcgttcacgccgaatccggcagttgtgctccgatgcctgatgcgacgctggcgcgtcttatcaggcctacaaaggcatacccattacgcctgcccaatatacaaatagatcgccagaaagtggcacacactaccgccgagcacgaagccgtgccagatggcatggttgtatggaatgcgtttgcagacgtagaaaatcaccccgaggctataaaccacgccgcctaccgccagtaaggtaacgctgcccgccgcgagcttaactgccatttcataaattaccaccaggctcagccagcccatcgccagataggtcaccagagataaaattttgaatcggtgcgcgatggtcagtttaaacagaatacccagcaatgccaggctccagataacaatcatcaacccgcgcgctaacggagaatccagccccaccagcaaaaacggcgtgtaggttccggcaatcaacaggtaaatagcgcaatggtcaaatttcttcagccacatttttgcccgttgatgaggaatggcgtgatagagcgtgctagcgaggaacagcaggatcatactgccgccatagaggctgtagctggttatcgctgtggcgctggcattaagatccaccgcctgaaccagtagcaacaccagcccaacgataccaaacaccaacccaatgccgtgactgacgctgttggctatttcctctgccagactatatccctgcttaatgaggggcttctgaaccataacttactccggagaaacgtacacgcacatgtatacctctccagcgtaactgagaatagttccagtgaacacctgttagctaaaataaattctgatttgagactaatctcctaaaaatcatgaaattaaatgcgaaatttcaactaacaggcgtgagttcaatttaaagacatttaaattcaatcacataaaattgtgtctgaccgggatagatgtcagcaatgacttttttcagttcagtcagggtcatattttcctgctctgcatgtttttcagtcagcgtatccagcgttacggtactggttgcggtgacttcaatcgtgcaaaaataaccgtcatcttcaaaacgtccgacacgaagcacatcacccgttttgaagtggctttcagactcgtcgcggatggtgatggttttacgcccagccagaatgtcatcctggaaacgttgaaaaaaagtgatgtcgtttggctgcatggtactatttcctgtaagaattgactcatctggagcctatgatagtgaaaaaactcaccttaccgaaagatttcttatggggcggcgcagttgccgctcatcaggtcgaaggcggctggaacaaaggcggaaaagggccgagcatttgtgacgttctgaccggtggcgcacacggcgtgccgcgcgaaatcaccaaagaagtcttgccaggaaaatactatccaaaccatgaagccgttgatttttatggtcactataaggaagacatcaagctatttgccgaaatgggcttcaaatgttttcgtacatccattgcctggacgcgcatttttccaaaaggcgatgaagctcagccaaacgaagaagggctgaagttctacgatgatatgttcgatgaactgctgaaatacaacatcgaaccggtgatcaccctctcccactttgaaatgccgctgcatctggtgcagcaatacggtagctggaccaaccgtaaagtggttgatttctttgtacgtttcgcggaagtggtatttgaacgctataagcacaaagtcaaatactggatgaccttcaacgaaattaacaaccagcgtaactggcgtgcaccgctgttcggttactgctgctccggcgtggtgtataccgagcatgaaaacccggaagagacgatgtatcaggtgctgcatcaccagtttgtcgccagcgccctggcggtgaaagctgcgcgtcgcattaacccggagatgaaagtcggctgtatgctggcgatggtgccgctctatccttactcctgtaacccggacgatgtgatgttcgctcaggagagcatgcgcgaacgctacgtctttaccgatgtgcagctacgcggctattacccgtcctatgtgttgaacgagtgggagcgtcgcggatttaacatcaaaatggaagacggcgatctggatgtgctgcgtgaaggcacctgcgattatcttggtttcagctattacatgaccaatgcagtgaaggccgaaggcggcaccggcgatgcgatctctggttttgaaggcagcgtaccaaacccgtatgttaaagcatctgactggggctggcagattgatccagtaggtctgcgctatgcactttgcgaactgtatgagcgttatcagaggccgctgtttattgtcgaaaacggttttggcgcttacgacaaagtggaagaagatggcagcatcaacgacgactaccgcattgactacctgcgcgcccatatcgaagagatgaaaaaagcggtgacttacgatggcgtggatctgatgggctacacaccgtggggctgcatcgactgcgtgagcttcaccaccgggcagtacagcaaacgctacggctttatctatgtgaataaacatgacgacggtactggcgatatgagccgtagtcgtaagaagagctttaactggtacaaagaggtgattgccagcaacggcgagaagctttaagtcgatgaagtaccggatgcaatacttgttgcatccggtcagacaacttccctgttttatttcccgcccgccaaatcgataaaacttcccgtgacgtaagaggctttatcacttagtagccagacaatggcctgcgcgacctcttctgcctgtccaccacgctgcatggggatgttgctcttaacgcgatcgacgcgtccaggctcgccgccgctggcgtgcatttcggtataaataaaccctggccgcacgcagttaacgcggatcccctgcgcggcgacttccaggcttagtccggtggttaacgtatcaatcgcccctttgcttgccgcgtaatcaacatattcccctgggctacccaaccgactggccacgctagagacattgacgatagcgccgccactgccaccatttttaagcgccatgcgttttaccgcctcgcggcagcagagaaaatatcccgtcacgttggtggaaagtactcggttgattcgctctgcggtaaggttttcaacggtgcactgggtaaacaagatcccggcgttattgaccagcgctgctagcggttcatcgtgctgatcgattgctgtaaacatcgcaacgacctggttttcgtcgctgatatccgcctggagcacgaatgctttgccaccggcttgcgttattaagttcatcacttcctgcgccgcgtggaggttttgctgataattaaccgccaccgtatacccttcttgcgccaacagtaatgcagttgcccgcccgatgccgcgactgccaccagtcacaagtgctatagccatttgtttttccgagaaaaattaattcgttgacgtatctttgagattgctaacaaactggctcaatcttcaatgttggcacgcttttccccctcgccctttcagggagagggccggggtgagggtaaatattcgcgccagtgccggcctgttcccctcaccctaaccctctccccaaaggggcgaggggactgtctgagcacttttgtactttgtcatctgactaaaaaggcgccgaagcgcctttagaaaatagtcgaatcagtgaattactggtattcgctaatcggtacgcaggagcagaacaggttacggtcgccgtaaacatcatccagacgtttcactgtcggccagtatttgtctgccacacctgccgggaataccgcaacttcacggctgtacggatgcgcccactcggcgaccagttcgctctgaatgtgcggcgcgttcaccagcgggttatcttccagcggccagacaccggctttcacctggtcaatttctgcgcggatagccagcatcgcgtcgataaagcgatccagttccactttgctttcagattcagtcggttcaaccatcagcgtacccgccaccgggaagctcatcgtcggcgcgtggaaaccgtagtcgatcaggcgcttggcaatatccagctcgctgatgccggtttcttctttcagcgggcgaatatcgagaatacattcgtgcgccacgcgaccgtcgcgaccggtatacagcaccgggaaggcatcctgcaggcggctggcaatatagttggcgttgaggattgccacctggcttgcttttttcagcccttctgcgcccatcatgcggatgtacatccagctgattggcaggatagaggcgctaccgaacggtgccgcagaaaccgcgccctgacgggttaacatgccttcgatttgcaccacgctatgacccggtacaaacggtgccaaatgcgctttcacgccgatcggtcccatacccggaccaccaccgccgtgcggaatgcagaaagttttatgtaggttaaggtgactaacgtccgcaccaataaagcccgggctggtgatgccaacctgggcgttcatgttcgcgccatcaaggtaaacctgaccgccgaactgatgcacgacttcacacacttcacggatcgtttcttcatacacgccgtgggtagaaggataagtcaccatgatacaggagaggttatcgcccgcctgttccgctttcgcgcgcagatcagtcagatcgatgttgccgtttttatcacacgccacaaccaccacctgcattcctgccatatgtgcagaagcggggttagttccgtgcgcagaagccgggatcaggcagatatcgcgatgcccttcgttgcggctttcatgataatgacgaatcgccagcaggcccgcgtattcgccctgtgcgccagagttcggctgcatacaaacggcgtcgtaaccggtcagtttcaccagccagtcagccagctgcgcaatcatctgctgataaccttcggcctgctccggcgggcagaacgggtgcagttcggcaaattccggccaggtgattgggatcatctcggcggcggcgttcagtttcatggtgcaggaacccagcgggatcatcgcctgattcagcgccagatctttacgctccaggctgtgcatatagcgcatcatttcggtttcgctgtggtagcgattaaacaccggatgggtgaggatttcgtcgtcgcgcagcatcgcaggctggatagagcggctgtcgtgagccacgtctttgtccagcgtgtcgatgtccaggccgtggttatcgcccagcagcacgttgaaaagctgcattacgttttcacgcgtggttgtttcatcaagggtgatcccaaccgcgttcagaatatcgctacgcaggttgatttcagccgcttcggcacgcgtcagtacgcccgctttgtcggccacttccacacacaaggtgtcgaaatagtgcgcatggcgcagtttcagacctttttgttgcaggcccgccgccaggatatcggtcagacggtgaatgcggttagcgatacgtttcaggccaaccgggccgtgataaacggcatacaggctggcgatgtttgccagcagtacctgggaagtacaaatgttggagttcgctttctcacggcggatatgttgctcgcgagtctgcatcgccatgcgcagcgcggtattgccagctgcatctttgcttacaccgataatacggcccggcatactgcgtttgtattcatctttcgccgcaaagaatgccgcgtgtgggccaccgtagcccatcggcacgccgaagcgttgcgcgctaccaaaaacaatatccgcgccctgtttacccggcgcagttaacagcaccagcgccataatatcggcggcaacgctgaccacaattttgcgacttttcagttcgctaataagcgcagtgtagtcgtgaatttcaccggtagtgcctacctgctgtaacagcacgccgaagacgtcctgatggtcgagcactttttgcgcgtcatcgacaatcacttcaaaaccaaaggtttcggcacgagtacggaccacatccagcgtttgcggatgcacatcggaagccacgaagaagcggttggcatttttcagtttgctgacgcgtttcgccatcgccattgcttcggcggcagcggtggcctcgtccagaagagaagcagaggccatatccagtccagtcaaatccagcgttacctgctggaagttgagcagtgcttcaaggcggccctgggagacttcaggttgatacggagtgtacgcggtataccagcccggattttccagcatgttacgcaggataaccggcggtagctgcacggcggtgtaacccatgccgatgtaagacgtgaagcgtttattgcgactggcaatagccttgagttctgccagtgcggcgtattcggtcgccggtgcgccaacctgcggtggtgtcgcaagttgaatatctttcggcacaatctggccggtcagcgcgtttaagctttgtgcaccaacggcattcagcatttcttgctgttgcgcggcgtccggtccgatatggcgttcaataaaagcgccgctgttttcaagctggcttaacgtctgtgtcatgagcgatggttcctgaaacgtgcagtgaattgtgaacctctctccttacgaagagagtgagggtgaggcataaattttcctcaccctgatcctctcccgcagaagaggaataaagccgttactcgtcttctaacaatgcttcgtatgcggtcgcatccagcagactttccagttcgctttcatcgctggctttgattttaaagatccagccgcctgcatacggttcgctgttcaccagttccggggaatcgctcagtgcgtcgtttaccgccacgatttcaccgcttactggcgcataaatgtcactcgccgcttttacgctttcggcaaccgcgcagtcatcgcccgcgctaaccgttgcgcccacttccggcaggtcaacaaacaccatatcgcctaacagctcctgagcatgttcggtaataccaacggtgtaagtgccgtcggcttctttacgcagccattcgtgttctttgctgtatttcagttctgctggtacgttgctcatcaatcaatctccaaaaaagtaaatcacgcgacggctttgccgttacgcacaaaaacaggttttgtcactttaaccggcatttcacggttgcgaatttgcacaatcgccgtttcgccaataccttccggcacgcgcgccagcgcaatgctgtaacccagcgtcggggagaaagtaccgctggtgataatgccttcatgctggttgccctgcgcatcggtaaagcgtaccggcagttcattacgcagcacgcctttttcggtcatcaccagaccaaccagtttttctgtaccatgctcacgctgcacttccagggcttcacgaccgataaagtcacgatctgccggttcccaggcgatggtccagcccatgttggcggctaaaggagagatggtttcgtccatctcctgaccataaagattcatgcccgcttccagacgcagcgtgtcacgcgcgcccaagccacatggcttaacacccgcttccaccagcgcacgccagaaatcggccgctttttcattgggcagcgcaatttcatagcccgcttcaccggtataaccagtggtggcaataaacagatcgcccgcctgcacgccaaagaacggtttcatcccttccaccgcctgacgctgggcgtcattaaacagtgtggcagcttttgcctgcgcattcggcccttgcacggcaatcatggaaaggtcatcacgaacggtaatttcgatgccgaaaggttcagcgtgttgggtaatccaggagaggtctttttcgcgggtggcggagttaacaacgaggcggaagaaatcttcagtaaagtagtagacgatgaggtcatctatcacaccgccagaggcattcaacatcccgctgtaaagggctttgccgcttttggtgagcttcgccacatcgttcgccagcagataacgcagaaactcccgggtgcggctgccgcgaagatcgacgatggtcatatgactcacatcaaacattccggcatcggtacgtaccgcatgatgttcgtcgatttggctaccgtaatgcagcggcatcatccagccgtggaaatccaccatgcgagcgccgcaaagcgtgtgttgttcgtacaaaggagtctgttgtgccatcttgtcctcattgaataagcggggctgacaactttttcatggtgaaattatcaccacgaaacccagcatcggagccactcccggtccccaacgcaatcgttctcttttgcctgaacttaccaccgaaacagactgttaaccataaggtaaaattgatcatcacattagcttatggttaaaaaatgcaaaaatcgcgacagaataaaaaaccaaaaaatacaccagtttctatacaaagatgatgtgatgagaaagtcaatttgaataagacaatattaagagctaaaaaaatgtcaaaaaacactaaatcaaaaaataatggcattagaaaatataatgcgaaaacggaggtgaaattagtttatttcaaatgaggaaaatctcccggcgaaaaaaccgggagatgaaagtgtgatgggtatcaaataaacaacagaggagaaatttttaacgcagccattcaggcaaatcgtttaatcccattgcctggcggataagttgcggcttaacgccaggaagcgtgtcggccagtttcaaaccaatatcacgcagcagttttttcgccggattggtaccggaaaacagatcgcggaatccctgcataccagccagcatcaacgccgcactgtgcttgcggctacgctcatagcgacgcagataaatgtactgcccgatgtctttcccctgacgatgcaaccgtttcagttcggcaatcagctctgcagcatccataaagccgagatttaccccctgccccgccagcgggtgaatggtatgtgcggcgtcgcccaccagcgccagacggtggctggcaaactggcgcgcataacgccccgtcagtgggaacacctgacgcgcgctctcaaccttgcataagcccaggcgattatcaaaagcgatatttaacgcgcgattaaattcgtcttcacttgcctgctgcatccgctgcgcttcctctgggctcagactccagacaatgctgcaaagatgcggatcgctaagcggtaaaaaggccagaatgccttcgccatggaaaacctgccgcgccaccgcatcatgcggttcttccgtgcgaatggtcgctaccagcgcgtgatgctgataatcccagaaagtcagcggaatatcggctttgttgcgcaaccaggaattagcgccgtccgcgccaatcaccagacgcgccgttaacatgctgccatctttcagcgtcaggaaggtttcattttctccccaggcgacctgctgtaattctgcgggggctaacagagtgatatcactgctctgatgcgctttgttccacagcgcgtagtgaatcacactattttcaacgatatgcccaagatggctatagcccatgctttgatcgtcaaagctaatgtgaccaaagctgtctttgtcccacacttccataccgtgataacagctggccctacgagagagaatgtcctgccagacgccaagacgggtgagtaatttttcgctggcggcattgatagcgctaacgcgcagttgtggtggtgcattcgccgccagaggttcctgtacgcgctgctccagtacggcaacgcgtaagccgctcccctgtaagccacaggcaaccgccagccccaccatgccgccgccaacaatggctacatcaacactttgcattgtttattccttaaaaccgccttcaacgcgccacccaaccgagggtgcgctgcgccagcacatcgcgtgccggggtgaataattccatcgtcatcagcccgatgttgcgcccgacaaccagcggtgcccaacggttggcaaaaagatgtacaaggctgtccgtgacgccaatggttgcttcgcgatcgctctgtcgacgctgctgataacggcacaatacgccgtaatcccccatgtcttctccgcgctcctgcgcctgagtcagggtttccgcaagactcatcacatctcgcataccgaggttaaacccttgcccggcaatcgggtgcagagtttgcgccgcattgcccaccagcacggtacgatgggtaatagatctggcggcgtgggttaacgccagcggataagcactgcgtttaccagcgtgggtaattttcccaagtcgccagccaaaggcgctctggagttcacggcaaaacttctcgtcactccagctcaacacctcttcgcgccgttccagtggatgacaccagaccaggctacagcgtccgtcagacatcggcaacatcgccagcgggccatgttgcgtaaagcgttcaaaagcgcgcccttcatgcgcaacggaagtagcaacgttggcaatcacggccagttgttcgtaaggctcctgctgccagtcaacgccgcacgcggtggctaacgcactatgggtgccatcagctgctaccagcacgcggcccgtcagcgtctcgccactctccagcgtcacttcaacgtgactctgagtacgggcaacgttagccacgcgatcagggcaatgcagcgttacgccaggtgctttacgcagcaatgcaaacagccgttgcccgacattgtgcaattcgacaacctgtcccagcgccgccagttggtaatcttctgcggcgagggtgacaaatccagcgtgaccacgatcgctgacatgcacggtggtgatggcagttgcgcaatccgccagagattgccagacgccgatgcgcgccagttgctgacaggtacccgccgccagcgctatcgctcgtccatcaaagcccggatgagcatgactctctggcgcagtcgcttcaatcaaatgtaccggcagcgccccgtgacttaaccgggaaatagccagcgccagcgtcgcgcccgccatgccgccaccgacgatgattacgctcattgctttctcgcagcaaccatcaacgcttcgatttcttccggctttttcaccacgctggcggtgaggttttcgttaccggtttcggtaatcacaatgtcgtcttcaatacgaatgccgataccgcgatattgttctggcacttctgcatccggcgcaatatacagccctggctctacggtcagtaccatgcccggttccagaatgcggctgcgatcctgaccataaacacccacgtcatggacatccagtcctaaccagtggctaaggccatgcataaagaaaggacgatgggcgttctgagcgatcagttcatcaacatcacctttcaggatgccgagttttaccaggccgctaaccatgatgcgcaccacttcaccagtgacttccagaatggaagttcccggacgatacaggcgcaggctggtttcgagagactccagcacaatgtcgtagatttcacgctgggcctgggtgaatttgccgttgaccgggaaggtgcgggtaatatcgccagcgtaacctttgtattcacaacccgcgtcaatcaacaccaggtcgccgtcgcgcatttcacactcgttttcggtgtagtgcagaatgcagccgttttcaccgctgccgacaatggtgttataggacggatagcgcgcaccgtggcggttaaattcgtggtgaatttcgccttccagatggtactcgaacattcccggacggcatttttccatcgcccgtgtatgtgccatggcggtgatttctcccgcgcggcggagtacggcaatctcttctgggcttttgaacaggcgcatttcatgaacaacaggacgccagtcgatcatcgttgccggtgcggtgagattttgccggctacctttacgcagtttttccagcgcactgttcacgattacatcagcatatgcatattcgccctgggcatggtaaaccacatccaggccgttaagtagttgataaagttgctgattgatttcgctgaatgccagtgcgcggtcaacgcccagtttctctggcgcggcatcctggcctaagcgacggccaaaccagatctccgccgtcaggtcgcgaacgcggttaaacagaacgctgtggttatgagtgtcatcgcttttaatcagcaccagcaccgcttccggttcgttaaagccggtgaagtaccagaagtcactgttctgacgataggggtattcgctgtcggcgctacgtgttacttctggtgcagcaaaaatcagcgcggcgctgccgggttgcatttgctccaccagggcctgacggcgacgctgaaactcttgccgggatatctcactcataacactctccttacgttttttgtttttagtgtagagtcggtttttgtacttctggcgcggtcggttgcggatgagtaaaggtgtcgtggcataacagcgcggcaacacgaacgtattcgatgatctcttcaaggctcatttcaagctcttcctgatcttcgtcttcgtcgtaacccagttgcgcaatgttacgcagatcgtcgatagcttcaccggtttcgccggtcactttatccagcttcggttgcgtaacgccaagaccaagcaggaagtgattgacccaacctgccaatgcatcagcccgatcgaaaacgctgacatcatcgccatcaggcagataaagctgaaaaaggaagccgtcatcctgcagggcatcgctggtggcagagtgcattttacgcagtgcctgtgccagctcatgaccgaaagccatgccttcgttcgtcaggtcgtgaagtagcggtagccaactgctgtcatcgttaccgccacatatcatcccgctgattaaaccatgcatctcagctggggtcagacccgtcccttgttggttcagatactggttcatttcgttgtaaccaggcatttcgttctgtatagacataagcattcgtcgtcaaagggaggaatattcatgatatgctaccactttgggccctggtggaccagaaaagggcttgtctcttctcatcagggtagctatagtgtcgccccttcgcagaccatgggtctaaagacgaaggcagcgcagtcaatcagcaggaaggtggcatgtctgcacaacccgtcgatatccaaatttttggccgtagtctgcgtgtgaactgcccgcctgaccaaagggatgcgttgaatcaggcagcggacgatctgaaccaacggttgcaagatctgaaagaacgcactagagtcacaaatactgaacagttggtcttcattgccgcattgaatatcagctatgagttagcgcaagaaaaagcaaagactcgtgactacgcggcaagtatggaacagcgtattcggatgctgcagcagaccatagaacaagcgttacttgaacaaggtcgcatcaccgaaaaaactaaccaaaactttgaatgacacttttcggtttactgtggtagagtaaccgtgaagacaaaatttctctgagatgttcgcaagcgggccagtcccctgagccgatatttcataccacaagaatgtggcgctccgcggttggtgagcatgctcggtccgtccgagaagccttaaaactgcgacgacacattcaccttgaaccaagggttcaagggttacagcctgcggcggcatctcggagattcccttcttatctggcaccagccatgacgcaactaccagaactcccactgacattatcccgacaagaaatccgcaaaatgattcggcaacgtcgtcgtgcgttaacgccggaacaacagcaggaaatgggtcaacaagccgctacccggatgatgacttatcccccggtggtgatggcacatacggtcgctgtattcctctcttttgatggcgaactcgacacccagccactcatagaacaactctggcgcgccggtaagcgcgtatatcttccagttttgcatccctttagtgccggtaatttgctgttcctgaattaccatccgcaaagcgaactggtgatgaacaggttgaagatccatgagccaaaattggatgtgcgtgacgtgctacccctttcccgattagacgtgctgatcacaccgctggtcgcctttgatgagtacggtcagcgcctgggaatgggcggtggtttttatgatcggaccttacaaaactggcagcactataaaacgcaaccggtgggttatgcgcatgattgtcagttggtggaaaaactccccgttgaagagtgggatatccctcttcctgcggtggttacaccgagcaaagtctgggagtggtaagggcgatacacccgcatcgccctgattgacatcgttgattctttgacctaatttagtgagtaagggtaagggaggattgctcctcccctgagactgactgttaataagcgctgaaacttatgagtaacagtacaatcagtatgatgacaagtcgcatcataacccttctccttcaagccctcgcttcggtgagggctttaccgttacagccccatgctgccctgccatcgtaaatccccattaaataaacacaacgcattgatctgactttgatttattttctggagcagactcgcaaagtagaatgcgcaacgcggcaacggtgtggagaagggataaaaaaacgggcaagtcagtgacctgcccgttgattttcagagaaggggaattagtacagcagacgggcgcgaatggtacccggaatagctttcattgcctgcagcgctttttcggcaacgtcttcgtcggcttcaatatcaataaccacataacccatctgggcggaagtttgcagatattgcgcggcgatgttgacgccctgctcggcgaagattttgttcagcgcagttagcacgcccggacggttttcgtggatgtgcatcagacgacgcccaccgtgcagtggcaggctgacttccgggaagttcaccgcagagagcgtactgccattgtcagaatacttgatcaatttacccgcaacttccaggccgatattctcctgcgcttcctgagtgctaccgccaatgtgtggcgtcagaaggacgttgtcgaattcacacagcggagaggtaaatggatcgctattggtcgccggttccgtcgggaatacgtcgattgccgcccccgccagatgtttgctcgccagcgcatcacacagcgccggaatatccaccacagtaccgcggctagcattaatcagcaggctgccgggcttcattagactaatttctttcgcgcccatcatatttttggtggacggattctctggtacatgcagactcaccacatcgctcatattcagcaggtcagaaagatgctgtacctgagtggcgttgcccagcggcagtttattttcaatatcataaaagtaaacatacattcccaggctttcagccagaatgcccaattgcgtaccaatatgaccgtagccgatgatacccagctttttgccgcgcgcttcaaaagaacccgccgccagtttgttccacacgccacggtgcgctttagcattggcttccggcacgccgcgcaatagcagcagcagttcgccaatcaccagctccgcaacagagcgcgtattactgaacggtgcgttaaataccgggatcccgcgctttgccgccgcatccagatcaacctggtttgttccgatacagaaacagccaatagcgaccagtttttctgcggcgttgatcacgtcttcagtcagatgggtacgggatcgcaggccgatgaagtgggcatcgcggatggattcttttaattgttcatcatccagcgcgcctttgtgaaattcgatgttggtgtaaccagctgcacgaaggctttccagcgccttttggtgcacgccttctaccagcagaaacttaatcttgtctttctccaggcttacctttgccatttacccaatcctgtcttttgaaatgttgtgtgcggatttgcatccgcctttcaacatatcaaaaaataatattgcggcaatatgaacgtttgcgtcgcgatgttgaggaaatatcacgcaaaggtaattcttggatgaatatgctggtttagaggatttatttagagcaatcgacaattgcctggtaaaagcgtgacacatgtcaccaaatttaatgaagagaatttttttaacgggggaggttcccccgtcagatcatttcacaatggttttgacaccgtcaggtgtgccaatcagcgcaacgtccgcgccacggttagcaaacaagccaacagtcaccacgccaggaatcgcatttatggcgttttccatcgctatcgggtcaaggatttccatgccgtggacgtcgaggatcacgttgccattatcggtcaccacgccctgacggtattccggacgaccgcccagtttcaccagctgacgcgccactgcactacgtgccatcgggataacttctactggcagcgggaatttacccagaatatcaacctgcttggaagcgtctgcaatacagataaatttttctgcaacgctagcaatgattttttcacgggtcagcgccgcgccgccgcctttgatcatttgcatgtggccgttgatttcatctgcgccatcaacgtagatgccaaggctgtcgacttcgttgagatcaaaaacgtgaatgccgaggcttttcagtttttcagtggaagcatcactactggaaacggccccttcaatctggcctttcattgtaccgagcgcgtcaataaagtgtgcggcggtggaacctgtacctacaccaacaatggtgccgggctgaacatactgaagtgccgcccatcctactgcttttttcaattcatcctgcgtcatgatcgtttcgcctgtggtatgaaatttcacacgcattatatacaaaaaaagcgattcagaccccgttggcaagccgcgtggttaactcatccataaaatatcgcgcaatggcaggcatcccctttcgccccgcaaataaagcatacaacggtctgggtatgccgctccacggtgcaaacaggcgcaccagttcaccgttcgcaagcccctgtttacaggcaaattgaggcaataacgccacgccattcaacacaaccagggcgcgaactcgctgagcgaaatgcattagcgcaaatccctgatcttttaagctgcgcttttaaccacggatacaaatgttacccgccgacggcttcggtatatgcaacctgacacaaaattgtgtcatagtgcaggaaaaagcatttaccaggagcagacaacagcaatgaaacgcccggactacagaacattacaggcactggatgcggtgatacgtgaacgaggatttgagcgcgcggcacaaaagctgtgcattacacaaagtgccgtcagtcagcgcattaagcaactggaaaatatgttcgggcagccgctgttggtgcgtaccgtaccgccgcgcccgacggaacaagggcaaaaactgctggcactgctgcgccaggtggagttgctggaagaagagtggctgggcgatgaacaaaccggtagcactccgctgctgcttagtctggcggtcaacgccgacagtctggcgacgtggttgcttcctgcactggctcctgtgttggctgatagccctatccgcctcaacttgcaggtagaagatgaaacccgcactcaggaacgtctgcgccgcggcgaagtggtcggcgcggtgagtattcaacatcaggcgctgccgagttgtcttgtcgataagcttggtgcgctcgactatctgttcgtcagcagtaaaccctttgccgaaaaatatttccctaacggcgtaacgcgtagcgcattactgaaagcgccagtggtcgcgtttgaccatcttgacgatatgcaccaggcctttttgcagcaaaacttcgatctgcctccaggcagcgtgccctgccatatcgttaattctagtgaagcgttcgtacaacttgctcgccagggcaccacctgctgtatgatcccgcacctgcaaatcgagaaagagctggccagcggtgaactgattgacttaacgcctgggctatttcaacgacggatgctctactggcaccgctttgctcctgaaagccgcatgatgcgtaaagtcactgatgcgttactcgattatggtcacaaagtccttcgtcaggattaatccatcaaataatgcctgatagcacatatcaggcgttgtcctcacttctttttgtattccttgaatcacatcacaaaatagacaaatctcaggcggcaaaaaacgacgtctgaatgcattttttttgctggcgacaaacccacgtaaaaagctcaccgtaggcgcaaataccctcattttgattgcgttttacggagcaaataatgtctaacgtgcaggagtggcaacagcttgccaacaaggaattgagccgtcgggagaaaactgtcgacagcctggttcatcaaaccgcggaagggatcgccatcaagccgctgtataccgaagccgatctcgataatctggaggtgacaggtacccttcctggtttgccgccctacgttcgtggcccgcgtgccactatgtataccgcccaaccgtggaccatccgtcagtatgctggttttagtacagcaaaagagtccaacgctttttatcgccgtaacctggccgccgggcaaaaaggtctttccgttgcgtttgaccttgccacccaccgtggctacgactccgataacccgcgcgtggcgggcgacgtcggcaaagcgggcgtcgctatcgacaccgtggaagatatgaaagtcctgttcgaccagatcccgctggataaaatgagcgttagcatgaccatgaatggcgcagtgctaccagtactggcgttttatatcgtcgccgcagaagagcaaggtgttacacctgataaactgaccggcaccattcaaaacgatattctcaaagagtacctctgccgcaacacctatatttacccaccaaaaccgagtatgcgcattatcgccgacatcatcgcctggtgttccggcaacatgccgcgatttaataccatcagtatcagcggttaccacatgggtgaagcgggtgccaactgcgtgcagcaggtagcatttacgctcgctgatgggattgagtacatcaaagcagcaatctctgccggactgaaaattgatgacttcgctcctcgcctgagcttcttcttcggcatcggcatggatctgtttatgaacgtcgccatgttgcgtgcggcacgttatttatggagcgaagcggtcagtggatttggcgcacaggacccgaaaagtctggcgctgcgtacccactgccagaccagtggctggagcctgactgaacaggatccgtataacaacgttatccgcaccaccattgaagcgctggctgcgacgctgggcggtactcagagtctgcataccaacgcctttgacgaagcgcttggtttgcctaccgatttcagtgcacgcattgcccgcaacacccagatcatcatccaggaagaaagtgaactctgccgcaccgtcgatccactggccggatcctattacattgagagcctgaccgatcaaatcgtcaaacaagccagagctattatccaacagatcgacgaagccggtggcatggcgaaagcgatcgaagcaggtctgccaaaacgaatgatcgaagaggccagtgcgcgcgaacagagcctgatcgaccagggcaagcgtgtcatcgttggtgtcaacaagtacaaactggatcacgaagacgaaaccgatgtacttgagatcgacaacgtgatggtgcgtaacgagcaaattgctagcctggaacgcattcgcgccacccgtgatgatgccgccgtaaccgccgcgttgaacgccctgactcacgccgcacagcataacgaaaacctgctggctgccgctgttaatgccgctcgcgttcgcgccaccctgggtgaaatttccgatgcgctggaagtcgctttcgaccgttatctggtgccaagccagtgtgttaccggcgtgattgcgcaaagctatcatcagtctgagaaaagcgcctccgagttcgatgccattgttgcgcaaacggagcagttccttgccgacaatggtcgtcgcccgcgcattctgatcgctaagatgggccaggatggacacgatcgcggcgcgaaagtgatcgccagcgcctattccgatctcggtttcgacgtagatttaagcccgatgttctctacacctgaagagatcgcccgcctggccgtagaaaacgacgttcacgtagtgggcgcatccagtctggctgccggtcataaaacgctgatcccggaactggtcgaagcgctgaaaaaatggggacgcgaagatatctgcgtggtcgcgggtggcgtcattccgccgcaggattacgccttcctgcaagagcgcggcgtggcggcgatttatggtccaggtacacctatgctcgacagtgtgcgcgacgtactgaatctgataagccagcatcatgattaatgaagccacgctggcagaaagtattcgccgcttacgtcagggtgagcgtgccacactcgcccaggccatgacgctggtggaaagccgtcacccgcgtcatcaggcactaagtacgcagctgcttgatgccattatgccgtactgcggtaacaccctgcgactgggcgttaccggcacccccggcgcggggaaaagtacctttcttgaggcctttggcatgttgttgattcgagagggattaaaggtcgcggttattgcggtcgatcccagcagcccggtcactggcggtagcattctcggggataaaacccgcatgaatgacctggcgcgtgccgaagcggcgtttattcgcccggtaccatcctccggtcatctgggcggtgccagtcagcgagcgcgggaattaatgctgttatgcgaagcagcgggttatgacgtagtgattgtcgaaacggttggcgtcgggcagagcgaaacagaagtcgcccgcatggtggactgttttatcagcttgcaaattgccggtggcggcgatgatctgcagggcattaaaaaagggctgatggaagtggctgatctgatcgttatcaacaaagacgatggcgataaccataccaatgtcgccattgcccggcatatgtacgagagtgccctgcatattctgcgacgtaaatacgacgaatggcagccacgggttctgacttgtagcgcactggaaaaacgtggaatcgatgagatctggcacgccatcatcgacttcaaaaccgcgctaactgccagtggtcgtttacaacaagtgcggcaacaacaaagcgtggaatggctgcgtaagcagaccgaagaagaagtactgaatcacctgttcgcgaatgaagatttcgatcgctattaccgccagacgcttttagcggtcaaaaacaatacgctcagtccgcgcaccggcctgcggcagctcagtgaatttatccagacgcaatattttgattaaaggaatttttatgtcttatcagtatgttaacgttgtcactatcaacaaagtggcggtcattgagtttaactatggccgaaaacttaatgccttaagtaaagtctttattgatgatcttatgcaggcgttaagcgatctcaaccggccggaaattcgctgtatcattttgcgcgcaccgagtggatccaaagtcttctccgcaggtcacgatattcacgaactgccgtctggcggtcgcgatccgctctcctatgatgatccattgcgtcaaatcacccgcatgatccaaaaattcccgaaaccgatcattagcatggtggaaggtagtgtttggggtggcgcatttgaaatgatcatgagttccgatctgatcatcgccgccagtaccagtaccttcagtatgacgcctgtaaacctcggcgtcccgtataacctggtcggcattcacaacctgacccgcgacgcgggcttccacattgtcaaagagctgatttttaccgctagcccaatcaccgcccagcgcgcgctggctgtcggcatcctcaaccatgttgtggaagtggaagaactggaagatttcaccttacaaatggcgcaccacatctctgagaaagcgccgttagccattgccgttatcaaagaagagctgcgtgtactgggcgaagcacacaccatgaactccgatgaatttgaacgtattcaggggatgcgccgcgcggtgtatgacagcgaagattaccaggaagggatgaacgctttcctcgaaaaacgtaaacctaatttcgttggtcattaatccctgcgaacgaaggagtaaaaatggaaactcagtggacaaggatgaccgccaatgaagcggcagaaattatccagcataacgacatggtggcatttagcggctttaccccggcgggtagcccgaaagccctacccaccgcgattgcccgcagagctaacgaacagcatgaggccaaaaagccgtatcaaattcgccttctgacgggtgcgagtatcagcgccgccgctgacgatgtactttctgacgccgatgctgtttcctggcgtgcgccatatcaaacaagctccggtttacgtaaaaagatcaatcagggcgcggtgagtttcgttgacctgcatttgagcgaagtggcgcaaatggtcaattacggtttcttcggcgacattgatgttgccgtcattgaagcaagcgcactggcaccggatggtcgagtctggttaaccagcgggatcggtaatgcgccgacctggctgctgcgggcgaagaaagtgatcattgaactcaatcactatcacgatccgcgcgttgcagaactggcggatattgtgattcctggcgcgccaccgcggcgcaatagcgtgagcatcttccatgcaatggatcgcgtcggtacccgctatgtgcaaatcgatccgaaaaagattgtcgccgtcgtggaaaccaacttgcccgacgccggtaatatgctggataagcaaaatcccatgtgccagcagattgccgataacgtggtcacgttcttattgcaggaaatggcgcatgggcgtattccgccggaatttctgccgctgcaaagtggcgtgggcaatatcaataatgcggtaatggcgcgtctgggggaaaacccggtaattcctccgtttatgatgtatagcgaagtgctacaggaaagcgtggtgcatttactggaaaccggcaaaatcagcggggccagcgcctccagcctgacaatcagcgccgattccctgcgcaagatttacgacaatatggattactttgccagccgcattgtgttgcgtccgcaggagatttccaataacccggaaatcatccgtcgtctgggcgtcatcgctctgaacgtcggcctggagtttgatatttacgggcatgccaacagtacacacgtagccggggtcgatctgatgaacggcatcggcggcagcggtgattttgaacgcaacgcgtatctgagcatctttatggccccgagcattgctaaagaaggcaagatcagtaccgtcgtgccaatgtgcagccatgttgatcacagcgaacacagcgtcaaagtgatcatcaccgaacaagggatcgccgatctgcgcggtctttccccgcttcaacgcgcccgcactatcattgataattgtgcacatcctatgtatcgggattatctgcatcgctatctggaaaatgcgcctggcggacatattcaccacgatcttagccacgtcttcgacttacaccgtaatttaattgcaaccggcagcatgctgggttaatgactcgtcccgtcacgatcttcagcaatatgctgaagcatcgtggcggtataacgatgatttctgatactataaagatattcctgcatatacatcggcctgtgcggtgcatcaaaatatttcagcgttgccggattcaccagtcgccaggcaaaatgcgggatcaccgtcagaaaatgtccgcgctccacggcgctgattttggccataaaactgtagggacgataaataatggttggattgatcccacaaggtcgcatattcgcatcaatcattgcttcgaagttggcccggttctgaaagcgcatttgtagccagggcagctcctgaagcagctcttgctcttgtcgctcttcataacggcgagaaacgagaaagcctaatcgcagcggtggtagttcactgatagtcaggttttccagttcctgaactcgtgcagatacatgctgtggggagataataaaatctaactggcggtcaaaaagattatcgataacgccattttcgctgaactcaactggctgggcggtcacgccttcatacttatctccgagactaatcaactgatcgaaaataattgtcggataagtattatctatgccaatcacaatttctcgactacgacgcccactgttatggatttcattatcaatcgcagaaagccgttgataaaccgggaacagtttttgatacagttcctgtccggctttattgaggctgatattattatctttgcgggtaaatagcgtatagccaatttgttcttccagcgcggcaatgcttttaccaaatgggctagccgtcatatggattttttctgccgcccgggcaatattattggtttgcgctaataaaatgaaattgcgcatctttttgctaataaaaatgtccatccccctcccccgcatccttgtccgcttaaccgtttcagtcagcctatccttgatgaaaccgcgagcaaagataggtgattacgtcatggttttacagaaaattacagaaaaaggaggcaatatcgggtaaaggcattagcccgacgaatacgtcgggctacaaatattattgtgctgcaggtgttttagcgggttgttgatccacaggttctaactggaagaccacatcgacctgatcatcaaactgaatagcggcctgctcgtaagtttcctgggcggacaccggcgcggcatcggctttcatcatccgcaccattgggctgggctgatagttggaaacatggtagcgcacgctatataccggccccagtttacgatgaaagccgttcgccagttcctgcgcctgatgaatcgcgttatcaatcgctgccttacgcgctttgtctttataggcatccggctgcgccacgcccaggctcacagaacgaatttcgttaagacccgccttcagcgcgccatccagcaaggaattcagtttgtctaactgacggagcgtgacttccaccgttctcacagcgcggtagcctttaaggatacttttaccatcctgataatcataatctggctgggtgcgtaagttcgcactgctgatatcttttttcgcgatctgattgagttcaaggaaggaaatgtattgtgcgacgcgctcatctgcctgtttcttggcagtagcggcatccttcgcggccacgttaacttcaatcgcaagagtggcaatgtctggcaccgcatccacgcttgccgtaccggaggtgacaatatgcggtccatccggcaattcgttagcctgcgctgccatcccgctaatacccattaatgccgccagggcgataactttgaacttcacgttagtctctccgtgttaattgacttgcccaaaattcaggacctctggaggcaagcttagcgcctctgttttatttttccatcagatagcgcttaactgaacaaggcttgtgcatgagcaataccgtctctcgccagctgcaaggcaataaaccacataacacatcccacaaccagattgataatgcgctgtgcttttgccgtgcgcagacgcggtgccagccaggctgcgagaagagccagaccaaagaaccacaggaaagaggcgctaattgtcccgagtgcaaaccagcgttttggttccacatcaagttgcccgccaaggctgcccagtacaacaaaagtatccaggtaaacatgcggattcagccaggtcactgccaacatggtggcgataattttccatctgccttgcttcatgacttcggcgctggctaactcaatattactgctcattgctgttttaaaagcgccaaaaccataccacagcaagaaggctacgccgccccaggtgaccagcgccagcaaccacgggctctgcatcaataacgcgctgccaccaaaaatcccggcgcaaatcaggaccaaatcgctgatagcacaaagtaaggcaatcataatgtggtactgacgacgtatgccctgattcatcacaaaagcattttgtggaccgagcggtaggatcatagccgccccaagtgcaagaccttgaaagtaataagaaaacacgttggatattccgaattaagtatctgatgcagagactatatcgcgggattgttattagcggaaattgataatattaattggcaatcagaaaaactaataagagagaggccagagagtattatctggcctcagcgttgattacgcagctttgtcttctttcacccgcttaaagttcacatccatttgcgggtacgggaagctgataccggcggcatcaaattcacgtttaatacgctccagcacatcccagtacacgttttgcagatcgccgctgttgctccagacgcggaccacgaaattaatgctgcttgcaccaagttcgttcaggcgcacagtcatttcgcgatctttcaaaatgcgatcttcagactggataatattggtcaggatctgcttaacctgatcgatatcggaatcatacgccacgccaataataaattcgttacggcgaactggctcgcgggagaagttaataatatttccggcaataattttaccgttcggaataacgataattttaccgtctgcagtacgcatggtggtggagaaaatctgcacactcagcacagtaccggctacgccgcccaggtcaacatattctccggcacggaacgggcggaacatgacaagtaacacgccagcggccaggttagacagactcccctgcaaagccagaccaacagctaagcctgcggcaccgagtacagcaatgacactcgcggtttgtacacccacgcgtcccagtgcagcgattagcgtaaaggcgataataccgtaacggactaatgcagaaagaaaatcagcaacagtggcatcgattttacgggagatcatcaggcgattcaccgcgttggaaatcatccgcgcgataatcaaaccaacgatgatgatcgcgagtgccgccacgatgtttactgcataacttagcagcagcgcctggttagctaccagccagcttcccgcgccgtttatgctatcgacaacattcaaatcttccattcaatattccttttcaactgactcaaaatggagaaatacactccgccgccttatgacgggcagtctgacaagggtaaacaataaagcataattttgccaaatagatcacagatttctcatctgaatcaccttgcttttggcgaaaaaatccccgcagagcggggctcagacagatatcaatgtgcgctttgtcatgccggatgcggcgtgaacgccttatccggcctacaaaaacctgcaaattcaatatattgcaggatacgtgtaggcctgataagcgtagcgcatcaggcaattttgcttttggcgaaaaaaagacccgcagagcgggccttgagataagcagaaaggaatatcttacagaacgtcgatcgcgttcagttcctggaatgctttctccagacgagcgatcatgctagtctgaccggcacgcagccatacgcgcggatcgtagtatttcttgttcggctgatcttcgcctttcgggttacccagctgaccctgcagataagcttcgttcgctttgtagtagttcagaacgccttcccaggttgcccattgggtatcggtatcgatgttcatttttactacgccgtagcttacggagtctttgatttcctgagcagtagaaccggaaccaccgtggaatacgaagttcaggctgttgtgcggcaggttgtgtttcttggaaacatattcctgagaatcacgcaggatggtcggagtcagaaccacgttacccggcttgtaaacaccgtgtacgttaccgaaggacgctgcgatggtgaaacgcgggctgattttgctcagttcggtgtatgcgtaatcaacgtcttccggctgggtgtacagtgcagaagcgtccatgtggctgttgtccacgccgtcttcttcaccaccggtgcaacccagttcgatttccagagtcatgccgattttggacatgcgctccaggtatttagagcagatttcgatgttctcttgcagagattcttcagacaggtcgatcatgtgagaagagaacagcggcttaccggtagctgcgaagtgtttttcacccgcgtccaacagaccgtcgatccacggcagcagtttcttcgcgcagtggtcagtgtgcaggataaccggaacaccataatgttcagccatctggtgaacgtgatgcgcaccagagatcgcgcccaggatagcagcaccctgcggaacgtcagatttcacgcctttaccagcgataaaggaagcaccaccgttggagaactgaacgataaccggcgctttaactttagcagcggtttccagtacggcgttgatggagtcagtaccgacgcagtttactgctggcagtgcgaagttgttttcttttgctacctggaaaactttctgtacgtcatcaccagtgattacgccaggttttacgaaatcaaaaatcttagacatgtctcttgtcctgtatcgtcgggccttatactcgtcatacttcaagttgcatgtgctgcgtctgcgttcgctcaccccagtcacttacttatgtaagctcctggggattcactctcttgtcgccttcctgcaactcgaattatttagagtatgaaaaattgcgtgctctaaaagcgcgctgaaacaagggcaggtttccctgccctgtgattttttacttcttagcgcgctcttcgagcatcgctactgcaggcagtactttaccttccacgaattcgaggaatgcgccgccgccagtggagatgtaggagattttgtcagcaatgccgaacaggtcgattgctgccagagtgtcgccgccgccagcgatggagaacgcttcgctgtctgcgatagcgttagccacgatttcagtacctttgcggaagttcgggaattcgaacacgccaaccggaccgttccacagaatggttttcgcattcttcaggatttcagccagttcctgagcggaagcatcaccgatatccaggatctgctcgtcagctttcacatcgttaacagatttcagggtagccggtgcagtttcagagaactcggttgctacgcgaacatcagacggaaccgggatgttgcaggtggtcagcagacgtttagcttcgtcaaccaggtcagcttcgtacagggatttacccacatcgtggccttgtgccgcgataaaggtgttagcgataccaccaccaacaatcagctggtcagcgattttagacagggagtccagaacggtcagtttggtagatactttagaaccaccaacgatagccaccatcgggcgagcaggttctttcagtgctttacccagcgcgtccagttcagctgccagcagcgggcctgcgcacgcaacgtcagcgaatttaccgataccgtgagtagaagcctgcgcgcggtgagcagtaccgaatgcgtccattacgaacacgtcacacagtgcagcgtattttttggacagggtttcgtcgtctttcttctcgcctttgttgaagcgaacgttttccagaacaaccagttcaccttcagcaacgtcaacgccgtcgaggtaatctttaaccagacgaaccgggttagacagtttgtctttcaggtagttaacaaccggcagcagagagaattcttcgttgtactcgccttcggtaggacgacccaggtgggaagttaccatcacttttgcgccttgtttcagggccagttcgatggtcggcagagaagcacggatacgcgcgtcgctggttactttcccgtcttttactggtacgttcagatccgcacggataaatacacgtttcccagcaagatccagatcggtcatcttaattacagacatggtgaatcctctcgttgattctaaaagttttgcagacgctgcttgcgtcttacctgaaagcaacagtagccatagctaacgtcgtgtcgagcattcggttagcaaagccccattcgttatcgcaccagaccaacgttttgatcaggtgtgcgccactgacccgggtttgggtgccatcgacaatggcactgtgcggatcgtggttaaaatctacagagaccaacggcaattccgtatagtcaactataccatgaaatgcaccttgtgctgctttttgcagcaacaggttgacttcattggcttttacaggtttcttcaccgtcacgcttaaatcgattgccgtcacatttatggttggcacacgtaccgcaatcgcttcaaagcgatcgttaaattgcggaaaaaatcgtgtgataccggcggccagtttagtatcgaccggaatgatgctctggctggctgcccgggtgcgacgcaggtcaggatggtatgcatcaataacctgttgatcgtgcatggcggagtgaattgtggtcacagtgccggactcaataccgtacgcatcatctaacaatttgatgacgggaattatgcaattcgtggtacaggaagcgttagaaacgatgcggtgttccgcacgaagttgatcctgattgacgccgtaaacaacggtcgcgtcgagatcgttactgccaggatgactaaagagcacttttttggccccggcggcaatatgcgcttcgccatgctcgcgggagccatatacgccggtgcagtcgaggactacatcaacgccaagttcacgccaggggaggctttgcagactacgttcatgcaatacgcggatggcgtcatcaccaacaaaaagttgatcgcgttcctgtcgtacttcccatgcaaaacggccatggctggtgtcatatttcaacaaatgcgccatgcccgcagcatccgccagttcgttgattgccaccacggtaatttccgcccggcgtccggattcatacaaagcacgaaccacattacgcccgatgcgaccgaagccatttatcgctacgcgtacggtcatagatctcctgcaaggttttccctgagcaaatttgccagacagagtaatccagcaaatcgtccggggaaaccttacctgtcgcaaactgcgactgattggttaattgtcgaacatttaatcgactgaaacgcttcagctaggataagcgaaacgtggaataaaaggaatgtttgtccagccgaagaagacatttatctgactcacatcacacttttatccccttttgtgggaagctttattccaggctggcgtaataataaccctacaataactggaataaattgtcagcttgtgaagtgataccggccttcttcagtcatctctactatcagattggcctgacggctattcatcagcacacgctcgacattggggccatcggtgcgggcataaaatgcttcggctacttgccgcgttaatcctcccgcaattttacgactaatcaagcgctcccgcagaatttgagcaggtgcatgaataaaaatagaaaaatcgcagaaagatgccaactccagccacttttcatcatccagtaacaaccagtttccttcgacgatgacgagtggtgcggtaacgtgcaacgcatcttcaacaggatcatgcttttgtcgatcgtactgcggccacgtacaatccccttccacgacctggcgcagattttccgtcagtttcgcaacgtcaaatgtctctggtgcgcctttgaaggggcgcaattgatgcgcatccagccagctattgtaatggtgaaaaccatccatcgggagcgtctgaatagcgggcagttccgggtcttgttgcgcgagatattcccagaaggtggttagggtacttttacccgtccccggcggagcgcaaagaaaaaccaccgtacgccgctgcggatttaccgtctgtaaggccgccaacatgtgcagcaacggtttatgtacattttcaatctcttcgttctggtactgtgcctgtatcttcagcccattcaccgttaattcaattttcacggcgttaattcctttaaggtggtcgttactgccagcgtcagcgccgttttgaccattccgctaaaacgcgcctcactccagacggagaaatcagcgaacttcatcgcttttaacgcgtcatagagcatcgcattgcgggttatgctattgacgttgctgataaaatcccaggtcatgtcatcggcaaatccgggcgtttcatcctgttcgttcaggtaatgccagaactgggaaaaatgcgtgatatcggcgtacaaccatttatccattttcccaacgcataaatcaaacgcagtgcaacatcaatatcgtcaagcgggccgctttgggcgagtaacggcttcactgcatattccacgatctcttcatcgttatcgacaaacaggctcggcagaaactggcgtatcccctggagcaaaatggtatgcgcagttttcataaaactaaataaattgtcctgtgcatccagttgctcaagcacatcatcttctgtcagcgtcgccattggtcttccgatagatcaccatcaatgcagggagtctattatattacacgtttggtccgcgccgccgatcagtaatgtctgcgtccgcaccccattcgccgtctgttggataccgttcaccagctcaccgcccgtcacgcccgtagcgctaaagaggatatcgttccccctcaccagttcatcgaggctgtacacacggttaacgtcaacgcccattgccttgcaacgcttgcgctcctgctctgcaatctgccgattttccgtgtaatcccctttagcctggcaaaagtcaatcagctcggcctgcatatccccgcctaatgctttaacggcacaggcagaaatcacgccttctggcgcaccgccgatggtgtacatcacatcgtaaggattatcctgccagcaggtcagcacgctggcggcgacatcgccatccggcagggcaaaaaccttcacgcccagctgtgttgcttcctcaatcgcggcactcaggcgcggtttatccagcgtaaccatgcgcagcttatccagcggtttgcctaacgctttcgccacgttgcgcaggttgtccgtcagaggcaaagacagatcaatcgcgcccgccgccagccgattaacaaccagctttttcatatacatatcgggcgcatgtaacaggctatctcgaggggcgaaagccatgaccgccagcgcattgctctgccccatcgccaccatccgcgtgccttcaatgggatcaaccgcgatatcgacttctggcccatcgcctttgcccacctcttcgccaatccacagcatcggcgcatggtcaatttctccttcgccgataaccactcgtccacgaaaagcgacgtcgtttaatgcctggcgcatcgcggtgaccgccaggccatcaattttatttttgtcgccacatccggtttgcggccaggcagccaacgctgcctgttccgtaacgcgaaataatggccacgccagggacatcattgcgcggcctccccgatatcaacgccaaattgtgccagcagatatttctcggcctgttcattccagatgccgtgcgtttcctcaaccagccgcgccaactctttaaacagcggatcggttttgcctttttcggcaaaatcggcaatggcagtgagcggcatggtcacgccgttataaatgagttttttaccgccagggatatccggcagattgagcacggtttctggcaccgcatccaggccaccgatatgggtcaccataaagctcggctgtaactgcccagtggcgctaagggcaatcgcctctttcatgtcgtccgtactaccgccagatgtaccgacgacgtgcgtgctgttgtaatggacgttgtagaaattaaacggcactttgaagtttttatccgtcggcccggcaaagaagttcagacagccatcttccgccagtaattcatcagccatctcaacgacagcaggcaccgccgcataaacaaaaatgtcatcgaacccggcatctcctgtcagcgcccgcagcatctggacaggatcgctcatccctttggtattcacatacaccagctcaatgcctttactggccgccagttccaccggcagcagcttctgtacctgcgccagacgtttgtcgtcgatatcgaccaccaccacccggctcggttgtatgccgccgttaatggcgtaatcgatagcgccaatgcccatcggacctgcacacgccagcagtgcaatattgccgccaggtttgacgcccatgcgatgctcataaacatattgcgtggtgtgataattggcatgataagcaccaataatgcagcacataggctctgccaggctcgccgcagcaaaataagagccgtgatacggtaatacgcagcccaaattaatggcgatttcgggaataatcatataagtggcattgccgccaaaatattcgtagctgtagcccgcactatatccgcttggtaaccccatcgccggttgcaatacaaaacgctggccttttttatatttgccagtgagatttttacccacttcgacaataaccccggcacattcatgcccggtaatgaccggatgattttctaaatcgtcgggtacgcgtttatgttcactaccgagtaacgccgctttccaggtgcttaaacagacgctgtcagaaattacactcaccagtaattcattatcggtaatttctggcagttcaaatacgcgcagacggacatcccgcttgccataaatagcagcaactttggttttcatttttacctctgtaatcagtgtttatgttcggcggttaattgattaaataaagtgtcgagttttggatcgccaatatagttattaatcaatatcagtggtttatccgtcacacgtttcacgcgcccttccagactggcatgagtaacgacgatatccgcatccgcaggcacgttttctatggcgtaatgttttacttcaattgccagccccgctttttccaggcgtttacggaaggtggtcgcgcccatcgcactggagcccatccccgcatcgcaaacaaaggcgatacgcttaaccctgcttaagctgaatgcaccctcttgtttcatcgccttaaccgcattggcactctgagcaaactcatcttcgctctccgtttccaccgttttttccatcttcagtatcaggctagtaatagcaaaggacaccagggtacctaccgtaacaccggcaattgtcgccaggaagctgcctttcggcgtcagtgccaggtaagcaaagatagaccccggacttgggccagccaccagaccaccgtccagtaagttaaacatccaggtgccagacataccgcccgcaatcatggcaataatggtcagcggcttcatcagcacatacgggaaatacagttcgtggatcccaccgaggaagtgaataatcatcgccccgggcgcagaacgtttactcatccctttaccaaacaaggtaaacgccagcagcagccccaggcccggacctgggttagaggccaccataaagaagatggatttaccgttaacgctagcctgttgcattcccagcggataatagacgccctgatcgatcgcattattgaggaaaagcactttcgccggttcattgatgacactcaacaatggcagataacccgcatgtaccagcgcctcaatacactctttgacgaaagtattggcaattaacaccgccgggccgataacttcaaaacccagcagacaaaggagcatccccgcgatacctaaactgaagttattgataaccatctcaaaaccggcaggtatgcgtttttccagtgccttatcgacatattttatgaccaacccaccgagcggccccatgatcatactgccaaggaacatcgggatctctgcgccaacgatcacaccaatagtacctattccgcccatgaccgccccgcgtttaccgccgaccagatgaccacctgtagaaccaatcatcacgggcaataaataggtaatcatcgggccgacaattttggcgaaatgttcgttaggcagccaaccggtgggaataaataacgcagtaataaaaccccaggcaataaaagcaccaatattggggatgaccattgcagtcaaaaagcccccaaaagcctggacctttgcacgagcagacttgttttccataatattatcctgtagaggagagagtaattatccgcggctgataatgtccgctaattgtttttcactacttgctgttaagagttgttcgagtatttcttcttcgcacagtaattcacttaacgcctgaatagcgccaatgtggctatcggcatcggcagcagagagtccgatgagtaatttaattggttcgtcattccccggaaaataaacaccttgttcaagtaatgtcaaagacatcccggttttaagcgccccacattccggtcgcgcatgaggcattgccacgcctggtgcgagaatataataagggccattgttaatggtggaatctttaattgcctgaatgtaattctcgctgatatagtttttatccagcaaacttaccatgctgaaatcgatagcttcctgccaatcttttgcactatgtataacactgatactactttctggaaaataatcactaagccgcataaattatccttattttatttttagggtaccgtccggcggtaaaaataaaatactcgtgcggtttaatgaaagcaattgagcagggaaaccggtgttttgaaaacagtgaattattaatttcttatataacattgagttatagatataacaacaaatgtcaatacgcatatcgtgatgcatattacataattgatatttattgcatataaatatttgtgatctacaacacgccttatctattgcttgtccgcaaacggacatatcaaggtaataaaaaaggtcgccgaagcgacctttttacccgaaatgctaattacagcagttcttttgctttcgcaacaacgttatcaacagtgaagccgaactcttcaaacagcagctctgccggagcagattcaccgaaggtggtcataccgacgatagcaccgttcaggccaacatacttgtaccagtagtcagcaatacccgcttctacagcaacgcgtgcagtaaccgctttcggcagtacggattcacggtaagcagcatcctgcttgtcaaatgcgtcggtagacggcatggacaccacgcgcgctttcacgccttcggcagtcagtttttcgtaggcagcaacagccagttcaacttcactaccggtagcgatgaaaatcagttccggctgaccggcgcagtctttcagcacataaccaccgcgcgcgatgtttgccagttgctcttcagttcgttcctgctgcgccaggttctgacgggagaggatcagtgcggtcgggccgtcctgacgctcaacaccgtatttccacgcgaccgcggattcaacctggtcacacggacgccatgtagacatgttcggggttacgcgcagagaagcgacctgctcaaccggctggtgagtcgggccgtcttcgcccagaccgatggagtcgtgggtgtaaaccatcacctgacgctgtctcatcagcgcagccatacgtacggcgttacgtgcgtattccacgaacatcaggaaggtggaggtgtacggcaggaagccaccgtgcagggagataccgttagcaatcgcggtcataccgaactcgcgaacaccgtagtggatgtagttacccgcagcatcttcgttgattgctttagaaccagaccacagggtcaggttagacggcgccaggtcagcagaaccgccgaggaattccggcaacagcggaccgaacgcttcgatagcattctgagacgctttacggctggcgattttcgccggattagcctgcagtttagcgatgaactctttcgctttagcgtcgaagtcagacggcatttcgcctttcatacggcgggtaaattcagcggcttcctgcggataagctttcgcgtaagcagcgaatttctcgttccatgcggattctttcgcctggcctgcttctttcgcatcccactgagcatagatttcagacgggatttcgaacggcgcatatttccagcccagttgttcgcgggtcagggcaatttcagcgtcgcccagcggcgcaccgtgggagtcgtgggtaccggctttgttcggggaaccgaaaccgatgatggttttgcacatcagcagggaaggtttgtcagtcactgcgcgcgcttcttctactgcgcgtttgatagatgccgcgtcatgaccgtcgatgtcgcgaataacgtgccagccgtaagcttcgaaacgcattgcggtgtcgtcggtgaaccagccttcaacgtgaccatcgatagaaataccgttgtcatcgtagaatgcaatcagtttacccagcttcagcgtacccgccagagagcaaacttcgtgggagatgccttccatcatgcagccgtcgcccatgaaggcgtaggtgtagtggtcgacaatgtcgtggcccggacggttaaactgcgccgccagcgttttttctgcaatcgccataccgactgcgttggcaataccctgacccagcggaccggtggtggtttccacaccagcggtgtaacccacttccgggtgacccggagttttagagtgcagctgacggaagtttttcagttcttccatcggcagatcgtaaccggtgaggtgcagcaggctgtagatcagcatggagccgtggccgttggacagcacgaagcggtcacggtcagcccaggacggattctgcgggttgtgtttcaggaaatcacgccacaggacttcggcaatgtcagccatacccataggggcacccgggtgaccggatttggctttctgtactgcgtccatgctcagcgcacgaatagcattggcaagctctttacgactggacattttgactccagatcggatgatgaagggcacgcccttaacgacttgacgacagcgcgttttgggctacgccggaaaatttgccaacaatttaccacaagccgcgcgtcatgtacatggaacatccttttgccgcttcagaaatctctggatcatgctcgcatgttgcgcaatctactcgcccgtccgctgcgcttttccttatactgagactgagcgtcgattcacctgcaaacggcgcatttttagaataatcctgaccttgtgcggaagagaaaacatgaaaattcgcgccttattggtagcaatgagcgtggcaacggtactgactggttgccagaatatggactccaacggactgctcagtagtggagcggaagcttttcaggcttacagtttgagtgatgcgcaggtgaaaaccctgagcgatcaggcatgtcaggagatggacagcaaggcgacgattgcgccagccaatagcgaatacgctaaacgtctgacaactattgccaatgcgctaggcaacaatatcaacggtcagccggtaaattacaaagtgtatatggcgaaggatgtgaacgcctttgcaatggctaacggctgtatccgcgtctatagcgggctgatggatatgatgacggataacgaagtcgaagcggtgatcggtcacgaaatggggcacgtggcgttaggccatgtgaaaaaaggaatgcaggtggcacttggtacaaatgccgtgcgagtagctgcggcctctgcgggcgggattgtcggaagtttatctcaaagtcaacttggtaatctgggcgagaaattagtcaatagccaattctcccagcgccaggaagcagaagccgatgattattcttacgatcttctgcgccaacgcggcatcagcccggcaggtcttgccaccagctttgaaaaactggcaaaactggaagaaggtcgccaaagcagtatgtttgacgaccatcctgcatccgccgaacgcgcccagcatattcgcgatcgcatgagcgcggatgggattaagtaaagcctggtggtgtcgaacgtaggtcagataaggcgttcacgccgcatctgacatgaatggcacatttgttaccttgtgcgcattgccggatgcgatgctggcgcatcttatccggcctacgggtgccgaacgtaggtcggataaggcgttcacgccgcatccgacattaatggcacgttttacccgtgcgcatcgcatctggtgcttactcgccctttttcgccgcctgaatatacagcatttccagcgccagcgttgccgctgccagagcagtgatttcgctctgatcgtatgccggagccacttccactacgtccatcccaacaatgttgagatctttcaggccgcgtaccagtttaatagcgcgatcggaggtcaggccgccaatcactggcgtaccggtgcctggtgcaaaagcaggatccaggcagtcgatatcaaaagtcaggtaaaccggcatatcacccacaatctgtttcacttgggcgataacgtcatccacgctgcgatcgttcacctggcaggcgtccagcacggtaaagccgttgtctttatcaaactcggtacgaataccaatctgcacggaatgattcgggtcgatcagaccttctttcggcgcggtatagaacatagtgccgtggtcaaattcacaaccgttcgcataggtatcggtgtgggcgtcaaagtgtaccagcgccattttgccgaaatgcttcgcatgagcacgcagcagcggcagcgtaacaaagtggtcaccaccgaaagagagcatacgcttaccggcagccagcagcttctcggcgtgcgcctgcagcttttcgctcatctcacgggcatcgccaaaggcatataccagatcgccgcagtccacgacgttcagacgctcacgcatgtcgaaattccacgggaagcggttgtgttcccaggccagattcgtgctaacctgacggatcgctgccggaccgtggcgaccacccgcacgaccagaagtggccatatcgaacggcacgccagtaatcacccagtctgcatcgctgtcatacggctggaagttcatcggcaggcgtaaaaaaccaaaggcattggaaaccagactgttatcgtattgatgacctaaggtgctcatggatggactcctattacaaagtcgatataaaaaaacccttccgcgtcgttaggcccgacgaggaagggttggatttgtcacaataaattgtggcggattatcaccgctaaattaagcggattcaagtaacacaggacttactcatcttcaagataagtataaccgtacaaacctgcctcgaactcttcaaggaactgttgttgcagttcagcatcaagatcggttttcttcacttgatcgcggaactgggttaacagcgttttcggatcgagctgtacatattgcagcatgtccgccacggtatcgccttcgtcagacagttctacttctacgctaccgtcagggaagacgaacacgtcaaccgcttcggtatcaccgaacaggttgtgcatgttgccgaggatctcctgatatgcgccgaccataaagaaaccgagcatcggcggattctctggatcgtactccggcattggcattgtcgtggcaataccgtcaccatcaatatagtggtcgatagcaccgtcagagtcacaggtaatatccagcagcacagcgcgacgttccggcacttgatccagcccttccagcggcagaaccgggaacaactggtcgatcccccatgcgtccggcatgctctggaacaggctgaagttgacgtacattttgtccgccatacgttcctgcagctcgtcgataatcggacgatgagcacggttttgcggatccagctgcttttgcacttcatggcacatgctcaaataaagctgctcagcccatgcacgttcttgcaggctaaagatgccggaagagtagccgatatgaatgtcgtgcagatccatctgactgtcgtgtaaccattcacgcagagaacggcgagttcccggttcgtgcatctcctgccaggtttcccacatgctttgcagcgcgcgcggcgcatcttctgcaggcgcggtcggcaccgtgtattcgttacgttccacgccgatgatattagacaccagcacggtgtgatgcgcagtcaccgcacgaccgctttcggtgattaccgtcggatgcggcagaccgttttcttcacacgcatcgccaatcgcccagataatgttgttggcgtattcattgaggccgtagttcacgctacagtcggactggctacgagtaccttcataatccacgcccagaccgccgccgacgtcgaagcactgaatattgacgcccagcttgtgcagttccacatagaaacgcgcggattcacgaacgcctgtcgcgatatcgcgaatattcgccatctggctaccgaggtggaagtgcagtagttgcaggctgtcgagacgcccggcttcacgcagggtttcaaccagttgcagtacctgagtcgcagccaggccgaacttgcttttttccccgccggaggactgccatttaccgctaccctggctagccagacgtgcacgcacgcccagacgaggaacgacattcagacgttctgcttcatccagcacaatggcgatttcactcatcttctcaatgaccagatagaccttgtgccccatcttctcgccaattaatgccaggcggatatattcgcggtctttataaccgttgcagacgatgacgctacgggtcatgccagcatgtgccagtactgccatcaactcggctttggaaccggcttccagacccagcggttcgccgctatgaatcagggactcaatcacgcggcggtgctggttaactttgatcggataaacaaggaagtaatcgccgttatagccgtaggattccctcgcacgtttgaacgcggcgttaatggaacgcaaacggtgctgcaggatctgtgggaaacagaacagtgcaggcagacgctggccctgtgcttcacgagttttcactaactgcgcgagatcgacgcgagcttccgggacgtccgggtccgggcacacgctaatgtggcccagctcgttaacgtcatagtagttattgccccaccaggcaatattgtaagtacgcagcatcttgctggcttcctgggagctcattgcaacctcctgcatggagcgtagtacaccgtgttcgcccgcactgctaggcaaacccatagacatgtcgtcagacatagcgaacctcaaattattttattaagtgtaaaacagttaacgactatcgcagcctggaactggcttaacaacccataagcacatggattttccagcagactatgctgacgctccaactgcgcaaccggtttctttttcataacattattaagcacataaccgaacgtaagtgtgaaagttcggcgaaaccacgagaaaactcttgtttttacaagagcgcccttgttcagtcctcagtaactgtaaccagctcttgaatcctgagaagcgccgagatgggtatagcaagcgcaggtatgcaaagcagagatgcagagtgcggggaacgaatcttcaccagaacggtgagacaggttaagcagcagacaacggttcattatttcgtaagtcctccacggccgcctgttaagacgaacccacaagccaaaactctgattagtacccggctggaagtggcaacacgaaagaaacgtcgtgtgctttttatttaagccgcgcgccgcgttttataccccacaatggcagaaaattgcaaaagataaatacgcagaatgccggcattgtcaggaaaaatttccagccacgtttttaacagaatgagacagctttcaaaaaaaagtggaaatagggtgaagaattgacctaaaatagccatccagatgttaatccatccataccgattaacactcagactgccagtgtttttaacctgcagagtcgtggtaggatccgctaccacagaaaatccacacaacagtttgagctaaccaaattctctttaggtgatattaaatatggcaaaacacctttttacgtccgagtccgtctctgaagggcatcctgacaaaattgctgaccaaatttctgatgccgttttagacgcgatcctcgaacaggatccgaaagcacgcgttgcttgcgaaacctacgtaaaaaccggcatggttttagttggcggcgaaatcaccaccagcgcctgggtagacatcgaagagatcacccgtaacaccgttcgcgaaattggctatgtgcattccgacatgggctttgacgctaactcctgtgcggttctgagcgctatcggcaaacagtctcctgacatcaaccagggcgttgaccgtgccgatccgctggaacagggcgcgggtgaccagggtctgatgtttggctacgcaactaatgaaaccgacgtgctgatgccagcacctatcacctatgcacaccgtctggtacagcgtcaggctgaagtgcgtaaaaacggcactctgccgtggctgcgcccggacgcgaaaagccaggtgacttttcagtatgacgacggcaaaatcgttggtatcgatgctgtcgtgctttccactcagcactctgaagagatcgaccagaaaagcctgcaagaagcggtaatggaagagatcatcaagccaattctgcccgctgaatggctgacttctgccaccaaattcttcatcaacccgaccggtcgtttcgttatcggtggcccaatgggtgactgcggtctgactggtcgtaaaattatcgttgatacctacggcggcatggcgcgtcacggtggcggtgcattctctggtaaagatccaagtaaagtggaccgttccgcagcctacgcagcacgttatgtcgcgaaaaacatcgttgctgctggcctggccgatcgttgtgaaattcaggtttcctacgcaatcggcgtggctgaaccgacctccatcatggtagaaactttcggtactgagaaagtgccttctgaacaactgaccctgctggtacgtgagttcttcgacctgcgcccatacggtctgattcagatgctggatctgctgcacccgatctacaaagaaaccgcagcatacggtcactttggtcgtgaacatttcccgtgggaaaaaaccgacaaagcgcagctgctgcgcgatgctgccggtctgaagtaatctttcttcacctgcgttcaaaggccagcctcgcgctggcctttttcttttggataggcgttcacgccgcatccggcaaaaaaaccgcccgcacaataacatcattcttcctgatcacgtttcaccgcagattatcatcacaactgaaaccgattacaccaaccacaacagacaaagatttgtaatattttcatattattattcggttttcacagttgttacatttcttttcagtaaagtcttaattgcagataacagcgtttaatctatgatgatataactcaattattttcatgcacttaaatcataactaagataaatgttagtgtaagcgattacactgatgtgatttgcttcacatctttttacgtcgtactcacctatcttaattcacaataaaaaataaccatattggagggcatcatgcctgacgctaaaaaacaggggcggagtaacaaggcaatgacgtttttcgtctgcttccttgccgctctggcgggattactctttggcctggatatcggtgtaattgctggcgcactgccgtttattgcagatgaattccagattactagccacacgcaagaatgggtcgtaagctccatgatgttcggtgcggcagtcggtgcggtgggcagcggctggctctcctttaaactcgggcgcaaaaagagcctgatgatcggcgcaattttgtttgttgccggtagcctgttctctgcggctgcgccaaacgttgaagtactgattctttcccgcgttctactggggctggcggtgggtgtggcctcttataccgcaccgctgtacctctctgaaattgcgccggaaaaaattcgtggcagtatgatcagcatgtatcagttgatgatcactatcgggatcctcggtgcttatctttctgataccgccttcagctacaccggtgcatggcgctggatgctgggtgtgattatcatcccggcaattttgctgctgattggtgtcttcttcctgccagacagcccacgttggtttgccgccaaacgccgttttgttgatgccgaacgcgtgctgctacgcctgcgtgacaccagcgcggaagcgaaacgcgaactggatgaaatccgtgaaagtttgcaggttaaacagagtggctgggcgctgtttaaagagaacagcaacttccgccgcgcggtgttccttggcgtactgttgcaggtaatgcagcaattcaccgggatgaacgtcatcatgtattacgcgccgaaaatcttcgaactggcgggttataccaacactaccgagcaaatgtgggggaccgtgattgtcggcctgaccaacgtacttgccacctttatcgcaatcggccttgttgaccgctggggacgtaaaccaacgctaacgctgggcttcctggtgatggctgctggcatgggcgtactcggtacaatgatgcatatcggtattcactctccgagcgcgcagtatttcgccatcgccatgctgctgatgtttattgtcggttttgccatgagtgccggtccgctgatttgggtactgtgctccgaaattcagccgctgaaaggccgcgattttggcatcacctgctccactgccaccaactggattgccaacatgatcgttggcgcaacgttcctgaccatgctcaacacgctgggtaacgccaacaccttctgggtgtatgcggctctgaacgtactgtttatcctgctgacattgtggctggtaccggaaaccaaacacgttagcctggaacatattgaacgtaatctgatgaaaggtcgtaaactgcgcgaaataggcgctcacgattaatctccccaagcttcctcccatcgcggaggaagccacctcttgcagtcatcttttcttcgctctatcctctgccgctatgaaaacatcccgtctccctatcgccatccaacaggccgttatgcgtcgcctgcgggaaaaactcgcccaggccaacctgaagctagggcgtaactacccggagccaaaactctcttacacccagcgcggaacctccgccggaacggcctggctggaaagctatgaaattcgcctcaatcccgttttgctgttggaaaacagtgaagcttttattgaagaagtggtaccgcacgaactggcacatttgctggtatggaaacatttcggccgcgtagcgccacatggcaaagagtggaagtggatgatggaaaacgtgctgggtgttcccgcccgtcgtacgcatcagttcgaactgcaatccgtgcgtcgcaacaccttcccctaccgctgcaagtgccaggagcatcagcttaccgtacgccgccataatcgcgtagttcgtggcgaggccgtctatcgctgtgttcactgcggtgaacagctggttgcgaaataaccatctgaactatcaggaactttcctgatttggctgattgcataccaaaacagctttcgctacgttgctggctcgttttaacacggagaagtgcctacactagcgggattctttttgttaacccctaccccacgcgtacaaccgcgtggggagacgacgcggatttttaactatgcgtatcccccgcatttatcatcctgaaccactgaccagccattctcacatcgcgctttgcgaagatgccgccaaccatatcgggcgcgtactgcgcatggggccggggcaggcgttgcaattgtttgacggtagcaaccaggtctttgacgccgaaattaccagcgccggcaaaaaaagcgtggaagtgaaggtgctggaaggccagatcgacgatcgcgaatctccgctgcatattcacctcggtcaggtgatgagccgtggtgaaaaaatggaatttactatccagaaaagcatcgaactcggtgtaagcctcattacgccacttttttctgagcgctgcggcgttaaactggatagtgaacgtctgaacaagaagcttcagcagtggcagaagattgcaattgctgcctgtgagcagtgtggtcgtaaccgggtgccggaaatccgtccagcgatggatctggaagcctggtgtgcagagcaggatgaaggactgaaactgaatcttcacccgcgcgccagtaacagcatcaatacgttgccgttaccggttgaacgcgtccgcctgctgattggcccggaaggcggtttaagcgcagatgaaattgccatgactgcccgctatcaatttactgatatcctgttgggacctcgcgttttgcgtacagagacaactgcgctcaccgccattaccgcgctacaagtacgatttggcgatttgggctaacggagaagaataatgatcaagctcggcatcgtgatggaccccatcgcaaacatcaacatcaagaaagattccagttttgctatgttgctggaagcacagcgtcgtggttacgaacttcactatatggagatgggcgatctgtatctgatcaatggtgaagcccgcgcccatacccgcacgctgaacgtgaagcagaactacgaagagtggtttagcttcgtcggtgaacaggatctgccgctggccgatctcgatgtgatcctgatgcgtaaagacccgccgtttgataccgagtttatctacgcgacctatattctggaacgtgccgaagagaaagggacgctgatcgttaacaagccgcagagcctgcgcgactgtaacgagaaactgtttaccgcctggttctctgacttaacgccagaaacgctggttacgcgcaataaagcgcagctaaaagcgttctgggagaaacacagcgacatcattcttaagccgctggacggtatgggcggcgcgagcattttccgcgtgaaagaaggcgatccaaacctcggcgtgattgccgaaaccctgactgagcatggcactcgctactgcatggcgcaaaattacctgccagccattaaagatggcgacaaacgcgtgctggtggtggatggcgagccggtaccgtactgcctggcgcgtattccgcaggggggcgaaacccgtggcaatctggctgccggtggtcgcggtgaacctcgtccgctgacggaaagtgactggaaaatcgcccgtcagatcgggccgacgctgaaagaaaaagggctgatttttgttggtctggatatcatcggcgaccgtctgactgaaattaacgtcaccagcccaacctgtattcgtgagattgaagcagagtttccggtgagcatcaccggaatgttaatggatgccatcgaagcacgtttacagcagcagtaacccaccttagcgagaaggatctcgttgagactctgagtgacagcgcccttctttccacgcatactgggcgctgttgcttttttgaaccaggaaacagaacctctgacaatgaatttacagcatcactttcttattgccatgcctgctctccaggatccgattttccgtcgttccgtggtctacatttgcgaacataataccaatggtgcaatggggatcatcgtcaacaagccgctggaaaatctcaaaattgaagggattctggaaaagctgaagatcacgccggagccgcgtgatgaaagtatccgtctggataaaccggttatgctcggcggtccgctggctgaagatcgcgggtttattttgcatactccgccctccaattttgcttccagcattcgcattagtgacaacacggtaatgaccacttcccgcgatgtgctggaaacgctcggcaccgataaacaaccgtctgacgtattggtggctctgggttatgcctcctgggagaaaggtcaactggaacaagaaattctcgataacgcgtggctaacggccccggcagatctgaatattctgttcaaaacgccgattgccgaccgctggcgcgaggcggcaaaactgattggtgtggatattctcaccatgcctggtgtggcaggacacgcctgatgagtggaaccttactcgccttcgacttcggcaccaaaagcattggcgtagcggtcggccaacgcattaccggcaccgctcgccctttgcctgcaattaaagcacaggacggtacgccggactggaacattatcgagcgtttactgaaagagtggcagccggacgaaatcatcgtcggtttgccgctgaatatggacggcaccgagcaaccattgactgccagagcgcgtaaatttgccaaccgtattcatggccgtttcggtgttgaagtaaagctccatgacgagcgtcttagcactgtggaagcccgttccggtctgtttgaacagggcggctatcgggcgctcaacaaaggcaaagttgactctgcctctgcggttattattctcgaaagctatttcgagcagggatattaaggcgatttaaacgcctggcggagtgtaaataatatcatcgcgtcttattgccggatgcggcgtgaacaccttatccagcacacatctggcagcggctataggtctgataagacgcgttagcgtcgcatcagacatttattgcctttgtaggcccgataagcttgcgcatcgggcatggcaacgtcacaaacgcccttcccccacccggtgctgataactctgctgaaacgttatcatccccacctgctgcccggtttgaataacatgcggtaactggtgggttttcccttcgcgaatcaaattccccaccgcgggtgtgttaatcagcaattcaaatagcgccacgcgtccttcctgtttatccacttccagcttttgactcagcactgcccgtaaactacctgccagttgattacgcacggggtctttttcctgcgccggaaaactatccaccagtcgctcaactgcctgcgcggcaccacgcgtatgtaatgttgccagcaccaaatgcccggtttctgccgccgtcagtgccagacggattgtctcgctgtcacgcagctctccgagcaaaatcacatcaggatcttcccgcaatgcggcccgcaatccgcttgcgaacgtcatacagtgcaaaccaatttcccgctgctggatcaaacatcgctggctggcatagagatattcaacaggatcttccagcgtcagaatatgcgcatcggcatgttgattgagatagccaaccatcgccgccagcgtggtagatttgccactccccgtcgcccccgtcaccagaatcaggccattctcgctcttgagtaattccggcaataccgttggtgcgccaagctgttcgagctgcgggcagtggctaggtaacagccgtaacgccaggctaatgccatgccgttgcgcgaatgcgctgccacgcaatcgctggttttccgccaggctcacggcaaaatccagctgaccattctccagcaatattgcccgctgatcgtcatccagccactcccgcagtagctcttcgacgtccggcgtatcaaacggcgcagcttccattctgccgcgaatgcgccatcgtgcgggccaggcgctgcacaggtgtagatcgctgacgttatgctttacactaagggccacaatttcttccatattcatactaagatcctcggaaaatgaacgatattgcgcataacctggcacaggtccgggacaaaatcagtgcggctgcaacgcgttgcggccgttctccagaagaaattacgctgcttgcagtcagtaaaacaaaacctgcgagcgccatcgcagaagccattgatgccgggcagcgtcaatttggtgaaaactacgttcaggaaggggtagataaaattcgccactttcaggaactgggcgtaacaggattagaatggcattttattggcccgttgcagtctaataaaagccgcctggtggcagagcatttcgactggtgtcataccatcgaccgtttgcgcatcgctacccgtctcaacgaccagcgcccggcagaacttccccctcttaacgttctgattcaaattaacattagtgatgaaaacagtaagtccgggattcaactggctgaactggacgagctggcagctgcggtcgctgaactaccgcgtttacgtctgcgcgggttgatggcaatccctgcgcctgagagtgaatatgtaaggcagtttgaagttgcacgccaaatggctgtagcatttgccggactgaaaacgcgctacccgcatatcgacacgctctctctgggaatgagcgacgatatggaagccgccattgcggcaggtagcacgatggttcgtatcggcactgcaatttttggtgcgcgtgattactctaaaaaataaggaattaaaggaacgccatgaatacgttgactttcctgcttagtacggtcattgagctgtataccatggtgctgttattacgcatctggatgcagtgggctcattgtgatttttacaaccccttcagtcagtttgtagtgaaggtaacgcagccaattatcgggccactgcgccgcgttattccggcaatggggccaattgacagcgccagcctgctggttgcctatattctcagttttatcaaagccatcgtgctgtttaaagtggtgaccttcctgccaatcatctggattgccggtttactgattctgctgaaaaccatcggcctgctgattttctgggtcctgctggtgatggcgattatgagctgggtaagccaggggcgtagcccgattgaatacgtgctgattcagctggccgatccgctgctgcgcccgattcgccgcctgctaccggcaatgggtgggattgatttcagcccgatgatcctcgttctgctgctgtatgtcatcaatatgggtgtcgcagaagtattacaggcaaccggaaatatgctgctgccagggctgtggatggcgttatgaatgccgtaacagttaatgatgacggtctggttttacggctctatattcagccgaaagccagccgtgattctattgtcggtttacatggcgacgaagttaaagtcgccattaccgcgccgccggttgacggccaggccaacagtcatctggtgaagtttctcggtaagcaattccgggttgccaaaagccaggtggtgattgaaaaaggcgaacttggccgccacaaacaaattaaaatcattaatccgcaacaaatcccgccagaaatcgcggcgttaattaattaagtatcctatgcaaaaagttgtcctcgcaaccggcaatgtcggtaaagtgcgtgagctggcgagcctgcttagcgacttcggtcttgatatcgtggcccaaacagacctcggcgttgattccgctgaagaaaccggcctgacctttatcgaaaacgcgattctgaaagcgcgccatgcggcaaaagtgaccgctttaccggcaattgccgacgactctggtctggcggtagatgtgcttggcggcgcgccgggcatttactccgcgcgttattccggtgaagacgcgaccgatcaaaagaatctgcaaaaactgctggaaacaatgaaagacgtaccggacgaccaacgtcaggcgcgtttccactgcgtgctggtatatctgcgtcacgcggaagatcccactccgctggtatgccacggtagctggccgggcgtgattactcgtgaaccagcgggcactggtggctttggttatgatccaatcttcttcgtaccttccgaagggaaaaccgccgccgaactgacccgcgaagaaaagagcgccatttcccaccgtggtcaggcgttgaaactgctgctggacgctttacgtaatggttaaattacctccgctgagtctctacattcacatcccgtggtgcgtgcagaaatgcccgtactgcgatttcaactctcacgcgttgaaaggagaagtgccgcacgacgattatgttcagcatctgcttaacgatctggacaacgatgtggcttacgctcagggccgtgaagtaaagacaatctttattggcggtggtacgccgagcctgctttccggcccggcgatgcaaacgctgctggacggcgtgcgtgcgcgtttgccgctggcagcggatgcagaaattactatggaagcgaaccctggcacggtagaagccgatcgctttgtcgattatcagcgtgctggtgtgaaccgcatctctattggtgtgcagagttttagcgaagaaaagctgaaacgacttgggcgtattcatggcccgcaagaagcgaaacgcgcggcgaagctggcgagcggtttagggttacgtagctttaaccttgatttgatgcatgggctgccggatcaaagtctggaagaggcgcttggcgatctacgccaggccattgaactgaatccgccgcatctttcctggtatcaactgaccatcgaacccaatacgctgtttggtagccgaccaccggtgctgccggacgatgacgcgttgtgggatatattcgaacaggggcatcagttattaaccgcagcgggttatcagcaatatgaaacttccgcttacgccaaacccggttatcagtgccagcacaatctcaactactggcgctttggtgactacatcggtattggctgcggcgcacacggcaaagtgaccttcccggatgggcgcattctgcgtaccaccaaaacgcgtcatccgcgtggttttatgcaaggaaggtatctggaaagccagcgtgatgtcgaagccacagataagccgtttgagttctttatgaatcgcttccgtctgctggaggccgcgccgcgcgtggagtttattgcgtataccgggctttgcgaagatgtgattcgcccacagttagacgaggcgattgcccagggttatctcaccgaatgtgcggattactggcagataacggaacatgggaagctgtttttaaatagcctgctggagctttttctggctgagtaaacttgtattgccggatgcggcgtgaacgccttatccagccgacatgtggcagcggttgtaggtctgataagacgcgcaagcgtcgcatcagacgttgattgccggatgcggggtcaacgccgcatcctgctacaaatcgtgcactatatcaaacttacttaatcaccccattgcgccgcagttgttcggtatcttttttccagcgttcattagcttggttgatatcgtcaattttcatcaaaatcgcgacttttttactgtttatttcactaactttcatcgttaacggatattgccctttttcgagcgttacccagtcatcctgcaatttacggctaagtttttgactttgcagaaaagtctgtcgccgttgttcgttgatatcgaaatctcgtttctgctgaatcggcacttcataacactcttcactctgtttatgacatgccgcaatcgccggttgataaacctctttgtcatatttaaccgcgaacgcctcgctatcgttctgtttattaaactcatcacgctgttggtgaatttttttaaaggcgtcttcgcgggtcatttgcttaccgtttgcatcttttccccaatatgcatccgctgctttctgcgccgccaccatttgcttatcaagcgctttcacttccttttccagcgcaggaatgctgttcttctgggtattcaacgcagattcaagctgactaaagcgataattgaaatcttcgctattcacgatcagatatttattattcgttttgatatcgtcgaccacccgcccacgatcgctggctgccgcctgaaaagagtaaaagttcacgctccagccagacgcgggcgttcctttactggttaacatcgcgctgaattttaccggtttatctttcgtccaggtctgttcgagcagttcgtaatctgccaactgaccgacccaggtatagagatcgtcactggaagagacatcgccttccgcactccaggtggcctgattacccttagcatcaagattttttaaggtgatagcatcaagcttgagaatgccgtgatactgctttttgaattgatcttttaagatattttcagttggcggttcgccatctgcccaggcattaccagtcatcaacataagcagtgccgtgccaacaatccattgctttttcacccgaaaaacctcacgcggaataatttattccggtgattatcattagggtaattaaaattggcaatggacgtgagtctgaagtgaaaaagccccggcacgataccggggcgaggcgattagtactgattgaagatctgctggatctgctgcggatctttggtttgcgtcagagccagttgcagcagaacgcgcgctttttgcgggttcagcgtgccagaggcgacgaagccgtatttcgcatcatccacttcggcatcctgagtggtagcgcccgtcggtacgcgggaagaacgcacgactgcagtaccggttttcgcggcggtcgccagcgtgtcgaacacagatttatacaggttgccgttacccacaccagcgctaacgatgccatcatagcccgcatctaccagtgctttagccggaagatcggatgcgttagcgtagttataaacaatgccgactttcggcagttcattcagcttagagacatcgaatggcgtgtcgctggtatgcttacgtgccggggtacgctggtagtcaatcttaccgttgtgaatgtaacccagaggaccgtagttaacagacttgaaggtcgctacgtcggtggtgttggttttggtgacgtcacggccatcaagcacggtgtcattcatcactaccagcacgccacggttggcggaggctttatcagctgcggtcactaccgcgttatacaggttgaatggaccgtctgcgctcatagacgtggacggacgcattgcgccgaccatcaccaccggtttgtcgcatttcaccgtcaggtcgaggaagtaagcagtttcttccatcgtgtcggtaccgtgggtaatgacgaagccgtcggtcttatcgcagtcggtgttaatttttttcgccagtgtcagccagacattatcgttcatgtcctgggagccgatattcactacctgctcgcctttaacgttcgcaatgtcttttagttgcggcaccgcattaaccagattttctacgccaactttacccactgtgtagttagatttggttgcggagtcaccaccaccggcaatggtcccgccggttgctaaaatggtgatattgggtaatgccaatgctgcaccactaaaacccataaccagtgcggcaagtgccgtctttttgaaaaactccatttcattcctccagttacgtgaacgctacgcattatcccttagctctgtatgggaaatttgacgttaaacaatttacaacgtgaatatattttggagatctacaaagttagaggcaggtaacaaaacgaagaattaaacggcataaaaaagtattatgccgtcttaaaatagaggattattttaaattcccgaccagggctttgcggctatcttccagagtcacaacgcggctacaaacatctttgccaaactgctggaaatctttttcctgctttttccactcggtttggatactggattgcagcccccccaggcttcccagcacattctgtaatgggttaccgccgctttttcagcaccgctttcgcgcccatttcattaatgctgtcctgtaaaattccacccattgcctgattcactaattgctggccttcggcgcgaacctgatcaatggctttatagtgaaacgtcaggccatcgctgcgcgtttcaataatgcggttcatctgctctttcagctgcgcatcaagtttggtcagacggctgcgcattttgctgctttcgcccatctcctgaacgataattttatccagagcaatacgggctttctcgacgcggcttttcgcgccttcatcaatccacggcagcgtgctgcgtagttcagcctgataatccttcgcctgctcgcgctgggcggcattcagggaatattgcttaccgttatacatcacgttgccgtctggcgtgatcaccagattgccgttttcgcccttcacctgcacggtttgcgggctgacaatcacatcgtcacgcggcgtgacgctgcactggtagtcggcgtgagcggtcattgccgtcacactaagtgctgccgccagcagcattttgcgcatcatagtcttccctcaagaaaaaatcaggccagcatttgctggccccagattgataacaaagtacgcgttttccatgccggatgcggcgtaaacaccttatcccgcctactcgatcgtgcatctttccaggcctgataagcgtagcgcatcaggcagttttgcatttgtcatcgcccgtatgctttcttagtcccaccaaacgtcgaaaagttcgctggtgcgtacctcatccagtttgcgctcttccagccacttacgcacaatcgcctgatgttcttcggtgcatttgccgatttcctgcatgcagatcagaccttcccaggccagataaccgctgccgtcaaaggccagtttgttcggttcgataacctcgttaataaaatcatcaacggttttatcaatctgttcttcgcttgtaccttccgggaatcgccatgccacgctaaatcctaattcctggaattcgtcgatgtgcatttttttacgcagacgacggctacggttctttgccattatttcaccctctcgaacattaagtcccatactccgtgaccaagacgatgaccacgttgttcaaatttcgtcaccggacgacttgccggacgcggtacgtaatcattgctctcactcaggtttttataaccgtcaatagaagacatcacttcaagcatatgttccgcataaggttcccagtcggtcgccatatggaatacgccccccagctgcagtttgctttttaccagttcggcaaacggcacctgaacgatacggcgtttattatggcgcgctttgtgccacgggtcagggaaaaagagctgcaccatgcgcaaactattgtcaggaatcattttatgcagcacttcaaccgcatcgtgacacatcacgcgcaggttgcttaaaccttcttcatgcgcagaagccaggcacgcaccaacgcccggactatgcacttcaatgccgaggaagtcctgctcagggcgatctttagccattgccaccaggctcgcccccatgccaaaaccaatctcaagcgtcaccggcgcttcacggccaaaaagcgcggggaaatccagcatatcttcgctgaactcaacgcccatcaccggccagtagttttccagcgcatgttcctggcctttggtcagtcgcccctggcggcgcacaaaactacggatacggcgcagtgggcggccgttttcatcaaattccggactaatgacgtcgtttttcataaaggtttagtcgcttgtgaaagtgttctgaaaacgggcattatccaaagttagttgccggatgcaagcatgataaggccgtggctgcggaaagttccggtttacaccctgccgtcgctgtgctgcaatcttgcccccaacaacagtgaattcggtgaccatgcaagcgagccaatttagtgcccaggttctggactggtacgataaatacgggcgaaaaactctgccctggcaaattgacaagacgccctacaaagtatggctcagtgaagtgatgttgcaacaaactcaggttgcgaccgttatcccctattttgaacgctttatggcgcgcttcccgacggtgaccgatctcgccaatgcgccgctcgacgaagttctccacttgtggaccgggcttggctattacgcccgcgcgcgcaatctgcataaagcggcacaacaagtggcgaccttacacggcggtaaattcccggaaacctttgaggaagttgcagcactgccgggcgtcgggcgttccaccgcaggcgcgattctcagcctttctctgggtaagcactttccgattctcgacggtaacgtcaaacgcgtgctggcgcgctgctatgctgtaagcggctggcctgggaaaaaagaggtcgagaataaattatggagtttgagcgagcaggtgacgcccgcggttggcgtggaacggtttaatcaggcgatgatggatttgggtgcgatgatttgtacgcgcagcaaaccgaaatgtagcctctgtccgctacaaaacggatgtattgccgccgccaacaatagctgggcgctttatccgggcaaaaaaccgaaacagacgctgccggagcgcaccggctactttttgctattacagcacgaagatgaagtattgctggcgcagcgtccgccgagcggattgtggggcggtttatactgtttcccgcagtttgccgacgaagaaagtttgcggcagtggctggcgcaacggcagattgctgccgataacctgacgcaactgaccgcgtttcggcataccttcagccatttccacttagatattgtgcctatgtggcttcccgtgagcagtttcaccggctgcatggatgaaggcaatgcgctctggtataacttagcgcaaccgccgagtgttggcctagcggctcccgtggagcgtttgttacagcagttacgcactggcgcgccggtttaacgcgtgagtcgataaagaggatgatttatgagcagaacgattttttgtactttcctgcaacgtgaagcagaaggtcaggattttcagctgtaccccggcgagctgggaaaacgcatctataacgagatctccaaagaagcctgggcgcagtggcagcacaagcaaaccatgctgattaatgaaaagaaactcaacatgatgaatgccgagcaccgcaagctgcttgagcaggagatggtcaacttcctgttcgagggtaaagaggtgcatatcgagggctatacgccggaagataaaaaataaaaacagtgccggagcacgcctccggcaacttgcataaaaacaaacacaacacgcacccggaatgatgaaaaaatatctcgcgctggctttgattgcgccgttgctcatctcctgtagcacgaccaaaaaaggcgatacctataacgaagcctgggtcaaagataccaacggttttgatattctgatggggcaatttgcccacaatattgagaacatctggggcttcaaagaggtggtgatcgctggtcctaaggactacgtgaaatacaccgatcaatatcagacccgcagccacatcaacttcgatgacggtacgattactatcgaaaccatcgccgggacagaacctgccgcgcatttgcgccgggcaattatcaaaacgttattgatgggtgacgatccgagtagcgtcgatctctattccgacgttgatgatattacgattagcaaagaacctttcctttacggtcaggtggtggacaacaccgggcagccgattcgctgggaaggtcgcgcaagcaacttcgcggattatctgctgaaaaaccgtctgaagagccgcagcaacgggctgcgtatcatctacagcgtcaccattaacatggtgccgaaccaccttgataaacgtgcgcacaaatatctcggcatggtccgccaggcgagtcggaaatatggcgttgatgagagcctgattctggcaattatgcagaccgaatcttcctttaacccgtatgcggtcagccgttccgatgcgctgggattaatgcaggtggtacaacatactgccgggaaagatgtgttccgcagccaggggaaatccggcacgccgagccgcagtttcttgtttgatcctgccagcaatattgataccggcaccgcgtatctggcgatgctgaacaatgtttatctcggcggaattgataacccaacaagccggcgttatgccgtcatcaccgcctataacggcggcgcaggcagcgtgctgcgagtctttagcaatgataagattcaggctgccaatattattaacaccatgacgccgggcgatgtttatcagacgctgacgacccgccatccctctgcggaatctcgccgttatctttataaagtgaataccgcgcaaaaatcctaccgccgccgataattccattaaccgcccctgacgatgctcaggggcaaaaatgttatccacatcacaatttcgttttgcaaattgggaatgtttgcaattatttgccacaggtaacaaaaaaccagtccgcgaagttgatagaatcccatcatctcgcacggtcaaatgtgctttttcaaacactcatccgcatcacgatgtgaggaaattaacatgaatcttaagctgcagctgaaaatcctctcttttctgcagttctgtctgtggggaagttggctgacgaccctcggctcctatatgtttgttaccctgaagtttgacggtgcttctattggcgcagtttatagcagtctgggtatcgcagcggtctttatgcctgcgctgctggggattgtggccgacaaatggttaagtgcgaaatgggtatatgccatttgccacaccattggcgctatcacgctgttcatggcggcacaggtcacgacaccggaagcgatgttccttgtgatattgattaacagctttgcttatatgccaacgcttgggttaatcaacaccatctcttactatcgcctgcaaaatgccgggatggatatcgttactgacttcccgccaatccgtatctggggcaccatcggctttatcatggcaatgtgggtggtgagcctgtctggcttcgaattaagccacatgcagctgtatattggcgcagcactttccgccattctggttctgtttaccctgactctgccgcatattccggttgctaaacagcaagcgaatcagagctggacaaccctgctgggcctcgatgcattcgcgctgtttaaaaacaagcgtatggcaatcttctttatcttcagtatgctgctgggcgcggaactgcagattaccaacatgttcggtaataccttcctgcacagcttcgacaaagatccgatgtttgccagcagctttattgtgcagcatgcgagtatcatcatgagcattagccagatctctgaaaccctgttcattctgaccatcccgttcttcttaagccgctacggtattaagaacgtaatgatgatcagtattgtggcgtggatcctgcgttttgcgctgtttgcttacggcgacccgactccgttcggtactgtactgctggtactgagcatgatcgtttacggttgcgcattcgacttcttcaacatctctggtagcgtgtttgtcgaaaaagaagttagcccggcaattcgcgccagtgcacaagggatgttcctgatgatgactaacggcttcggctgtatcctcggcggcatcgtgagcggtaaagttgttgagatgtacacccaaaacggcattaccgactggcagaccgtatggttgattttcgctggttactccgtggttctggccttcgcgttcatggcgatgttcaaatataaacacgttcgtgtcccgacaggcacacagacggttagccactaattacgcaaagaaaaacgggtcgccagaaggtgacccgttttttttattcttacttcaacacataaccgtacaaccgtttcacgccatccgcatcggtttcgctataaacaccttgcagctccgggctaaatcccggcaacaaattcaccccttcttccagtgcaaggaaataacgttgaaccgccccaccccagacttccccgggtaccacgcaaagcacgccaggtggataaggcaacgccccttctgccgcaattcgcccttcggcatcacgaatccgcaccaactccacgtcaccgcgaatataagcgctatgcgcatcctgggggttcatcaccacactcgggaaactctgctggcggaacatcgctttttgtaggtctttgacgtcgaaactgacatacagatcgtgcatctcctgacacaactggcgcagggtgtagtcgcgatagcgcaccggatacttgttataaacgctcggcaacacctcaaccagcgggctgtcatcctcaatatgctgttcaaattgcgccagcatcgccaccagttgtgccagcttctcgtggctttccgccggagttaataaaaacagaatggagttgagatcgcacttctccggcacaatgccgttctcacgcagatagtgcgccagaatcgtcgccggaacgccaaagtcgctatattcgccggtttcggcatcgatacctggtgtagtgagtaacagcttgcacggatcaacaaaatactgatccgcggcatatccttcaaagccgtgccacttcgcccccggctcaaaactgaaaaaacggcggtcgctggctaacacacttgtcggataatcctgccacaatttgccatcaacaacgggcgggataaacgggcggaacagcttacagcgcgcaagaatagccttgcgcgcttcaatccctatctcaacacactcagcccacagccgacgcccactctccccttcatgaattttggcgttaacatccagtgcagcaaacagcggatagaaagggctggtagaagcatggagcataaaggcgttattcaaccgcttatgcgggcaaaaacgcgcctgtccgcggatatggttatcttttttatggatctggctcgtctgactgaatcccgcctgctgtttgtgcacgctctgagtcacaaagatccccggatcgttttcgttaagttctaacagcagcgggctgctatccgccatcatcgggataaattgttcataaccgacccacgcggaatcaaacagaatgtaatcacacagatgcccaacggtatcgatcacctgacgggcgttatagacagtgccgtcataggttcccagctgaataatcgccaggcgatacgggcgcggcaggtcggctttttctggcgcaacgtcgcgaatttgctggcgcagatactcttcattaaaacagtgcgcatcaataccgccaatgaaaccaaacgggttgcgactagcttccagatagaccggcgtcgcccccgcctgaatcagcgcgccgtgatgattgctcttatggttgttacggtcgaagagcaccagatcgccacgcgttaacagcgcattcgtcaccactttattcgctgcgcttgtgccgttcagcacaaaataggttttatcggcatgaaagactttggctgcgaatttctgcgcatctttcgcgcttccttcatgaataagcagatcgcccaattttacgtcagcgttacacatatcggcgcgaaagacgttctcaccaaagaaatcgtaaaaatggcgtccggcaggatgctttttaaaaaacgcaccatgttgatgtccagggcaagcaaaggtgctgttgcccatctcaacgtactgcgtcagcgtgtcataaaacggtggcagcaaattctcttcatactgacaggctgcggattccagctccagccactgctgctcgttgccgttgattaccgccgtaacgcccgcaggtaattcaacagcatgttcggaatacaaaaacaccggtagatgaaaaccggtgcgcttaagcaacgcaagaatgccactgcgactatccgcagcggtaatgacgactgccgcgacgtccgtaaaatcagtatctcccaacgccaccacgcgacgatgagaagaaagtcgggataccagttcactactggcggcaatattcatacttttcataagcgcaaacccgtttcggggaagtaagaataccggacaaggtggaaaaccctgccccatgagatatgggtcaaactggtcaccagctccgaccgccagacatcagtaaaagcagaaacgctctgattttactgttgtcctgcagtgagcgtgcgttaacttcaccgcatgagcagtaacatagaaagggaaacgtttcgcgcgaaacggcgataagcgagagaatgtaaggagatggcgtgcatcgggcaaactccgtacagagaggagaaaattcgcgcaatcatggcacctttcgctaaagcgtgcaagccaggactttgcgaacaaacaagccatcgacggcaccaaacggtcataataagaaaatcaaacaatacagctaacaggaactcttgtggtcatcggcccttttatcaacgctagtgcagtcttactgggtggcgttctcggcgcactgctcagccaacgcttaccggaacgtatccgcgtctccatgacaagtatttttggtctggcaagcctggggattggtattttactggtggtgaaatgtgccaaccttccagcgatggttttagctacgctacttggcgctctaattggcgaaatttgtttgctggagaaaggtgtcaatacagcagtcgccaaagcacaaaatctgtttcgtcacagtcgtaagaagccagcgcatgaatcttttattcagaattatgtcgcgattattgtcctgttttgcgccagcggcaccgggatcttcggggcgatgaacgaagggatgaccggcgatccgagtattttaatcgccaagagttttcttgatttctttacggcgatgatcttcgcctgcagcctgggtattgcggtaagcgtgattagtatcccattactgatcatccagttaacgctggcgtgggctgccgcgctgattttaccgctgaccacaccgagcatgatggcagacttcagcgccgtaggcggtttattgctgctggcaaccggattacgcatctgtggcattaaaatgttcccggtggtcaacatgcttccagcactccttctggcaatgccgctttccgccgcctggaccgcctggtttgcctgacaatgcgtgcaatatcggcaaagtgatgatagattgtgcagtctgcagtaaattgaagaaatttgattgacgagacgaggcgaatcaggtttaatgcgccccgttgcccggatagctcagtcggtagagcaggggattgaaaatccccgtgtccttggttcgattccgagtccgggcaccactaattcttaagaacccgcccacaaggcgggtttttgcttttggatctgacaataaccttcacgaaaaaaattagcttataaagtctgggggaattactctcgccacgttaacgagagtaattttattgatattaatctcctgatactttacccccgtccaaactccagccgctgcacattcaccatcccaggcttctcagcagcactgacatcaatttgtgtcacccgcagcgcatagaacgccattttgaatttacgaacggacgcattatcagtgactttaacggcatgggcaaagtgaaatatcattttttaacgataaaaagagtgttatttcttgtgtatcagacaataagcattcattcaaaacctttagaaataatcaaaacacaggtattccactggttaatatattcacatatgaaatgaataaatattggaatatataaatattgaatattttgattaatccccgtactgattattcttcataatcagtacggggttgctacaacatgtattactttttcaccacaattaacggttcaatatcactctcttttttgatgaccagactttcatcaccgcgcaaacacgtcccaccgtagttgccgccaacggtgaaggtacatacctgaatgtatttaccgtccactttcggcaaacaccacagttgctgatagatgtttttctgctcggcaaatttaccgctggttttgtccagcacctcttcatgatggctgacgaggtcgatattgctgccacagcgaccggcgatcggtttcactgcgtaacctgttttcaccagttcatcattaacagtgaaatcggtatccagcaggtaacgatggtgcgggaacaggctccagaggatcggcagaatcgctttgttgccggggatcaccgtccacagcggctcaaagaccagcacttccgggcgcagcaatacgtcgataagacgcacttcgttttgcggatgaccggtacggattggcaccgcagcaaactcacggtcgctaacttcacgaatctgatcaaacgcggtttcccacgcccaggttttccacacgcagttaaccagtcgcccttccccatcaatcagttgcccggcagcatcccagcccagttcatccaatccacgcaagatacgcgtttcaaagcccgcctggtgcagcgcctgctccataaactgcgcgtgatagttttcctcgatatctttgtcctgcatgatatggacaaacggacgtgcacgactgtgtttccaggcaccagccaattcgttaatcagcccttccgccggattgaagccgttgcctttatagccctgctccgcccaacgttcgaggatcaagcccgcttcggtatgacaggaggcggagtcggcgttgtactcgtaaaccttcaggccacgctcatccatgcagaaatccatacgaccagtgatcatatggtgacggcgacgctgccaggagagacgcaaacgtggccagaggattttcgggatgtcgaacagcgccagcaggttgtcatctttcagcaccttgtcggttgcgtgaagatacatcaggtgcagctcgttggtggctttaattagctcctgctcggcactctcggtaatggtgtagtaatgataaggatcctgattgatcacctgaccgttggcctgcacataggcgttttgcagcggatctttttcatccagccatttaccgtcaaactggcctttgttttccaggcgcgctccgctgattttcagcagctcgcctgcaatttccggctgcggtaagctgtattcagtatcttccgtctggatcatccagcccagaatggtggtgtcatcaaaagtgtctttcagggtatagcagccgttttcgaccaccatctccagctcgcgcgtccactgttgcccttgcggcaacggggaatgaatcacgttctgttccgcaatacggactttgttgccatgcaattgggtaatgatggcgacatggccagtgtctttaaattcaccgcctttatcccagataagaagcgcacccgcgaccggcgcacgcgggctgccgttaggaaatgcctgcaatggcaggatgttgtcattaaccacttctcgcaggaagcgcaggctgaaaatctcccacgccatacccacgtcagtaaagaccacaccgtaattcagaaagagaaaacggcgagcaaattcaacgcattgccacttgtggcccatatattcgtcgtcgatatagctacggaatacggcgtcatcttcgtattcctgcggatcgagagaactgtaatcactagagtagattgctaccccacctggggcgtagcccaataatgtcccgaacggggcatcctggctggtcgttcctttgctcatcactttacctttaacaatacaacctaagcagttggcgtaattgttgtgctctgattacctgctcagcgacattaaccggacagaggtcagactaatcatacacctcatcgcagcggctggcgcaaagggttaaaaaattcacattctgtacagcaagtgacctgctacactgcttcaacactaccactcagaaggcaactcactatgacagacaatacttatcagcccgcgaaagtctggacgtgggataaatccgctggcggcgcgttcgccaatatcaatcgcccggtttctggtccgacgcatgaaaaaacgctgcccgttggcaaacacccattgcaactttatagcctgggaacgccgaacggtcagaaagtaacgattatgcttgaggagctgctggcgctgggcgttactggtgcagagtacgacgcctggctgattcgtattggcgatggcgatcaattctccagcggctttgtcgaagtgaacccaaacagcaagatcccggcgctgcgcgatcatacgcataatccgccgatccgcgtgtttgaatctggtagcatcctgctttatctggcggagaaatttggctacttcctgccgcaggatttggcaaagcgtactgaaacgatgaactggctgttctggttacagggcgcggcaccgttcctcggcggtggttttggtcacttttaccattacgcaccggtaaagattgagtacgccatcaaccgctttaccatggaagccaaacgtctgctcgacgtgctggataagcaactggcgcagcataagtttgttgcgggcgatgagtacaccattgcggatatggcgatttggccgtggtttggcaacgtggtgttaggtggtgtgtatgatgccgctgagtttcttgatgcgggcagttataagcatgtacaacgctgggcgaaagaagtaggcgaacgtccggcggtgaaacgtgggcgtattgttaaccgcaccaacggaccgctgaatgagcagttgcatgagcgccatgacgccagtgatttcgagacgaatacggaagataagcgtcaggggtaagggttggtgttcgtcgcagcaagccatccaggccggataaggcgttcacgccgcatccggcaatcgtgcacaatgcctgatgcgacgctgccgcgtcttatcaggcctacgaaagctaatcatcacgcgctggtaatgtcgtaatccatttggcgcagtgcgtctaatgtggctttggcttcatcttcgtcgatgatgctcatggcaaatccgacgtgtaccagcacccactggcccagtagatcggcagggttaccttcacaaatcagggcgatattcacatcgcgcttgataccacatacttcaacctgcgcaagctggtgaatatcttcaccgacagccagcacctggcctggaacgccaatacacattattaactccggttattcaacttcaatacttttgacgatcaggctatcgccggtatcgacacgcaaccgctcgccgtgacagagcggacactgcgcatcgtgctgatgaatctccaccacctggctgcaatcccagcaccaagcctgggcgggtttatagacgatatgtaaatcgcacccttgcgccaccgttccgtggcagacaatttcaaaactaaaacggacggcgctctcctcaacgcaggagagcgcgccaatttccagccacacggcggtgacgcgcttaacatcgtgctgctccgcctgccgttggataatttcaacggcgctctggcaaagagacaactcatgcattttcgccactcctgcgaccaaacagcagggcgcgacgccctgcgtgtggtacatccggattcgtgactggcaggctaaggatcattcgtgcgcagtcatccgtcaggcgttggccctcttcaatgctcatgctgtggctaagcgggctcatcaggctacaggagagatattggctaacaccgtccagttcgccaacggtaaaggtcatagtgccatacggcagttgcagaccaattttttcactcactttgcgcagcggccagagttgatccgggccggggaagataactgcactcagcatccacggggtgatcacacaccccgtccactgaccttcgaacagcgtaaaatcagaaacatacaccggcatactaggatgcagaaaagagagatcgtgcatgctacgccgggcaatttcttcaaacactgcctgtacttgcgccttcggggaggtctggaaacctgctatctcttcagtcatgaatcgcctcccgtgggatggcttccacgccagattcacgcagcgcagccagaacctgctcaagcgcaggttcaatcattgcttcaaccgtcggcgttaagccgatgtgtggctccaggctttccgggatcacgccgaccagggtcagctttttcggaaactcgccggtgaagcgcagggcgctcaagacgtcggccaggccaagctgatgcggagagattttgttggtaaacaacgccggaacttcttcatcccgcaggatcatcatcgttcccggcgcgttctttttgctgacaatggcatccgcaataatcaaatgatcgcgatttgccatgtcgccaagcagctccattcccgccgtgccgccatcgaggatctcaacataatccggcagaatgtatcgttgctctaacgcttcgacaatccgcacaccgatggcttcatcggtcagcaaaatattgccgacccctaagactaaaatacgcattacagaaccttcacactaaccacttcgttgccgtcagcatccactacgtgtaccgcacaggccatgcacgggtcaaaggagtgaatggtacgcaccacttccagcggtttattcggatcggcaaccggtgtacccaccaggctctgctcgtaaggaccgacgtcatcattgaagttacgcggaccagagttccaggtacttggaacaaccgcctggtagttgctgatgataccgtctttaataaccatccagtgagagagcataccgcgcggcgcttcgaggaagccaacacctttgaattcacccgttgccggaatgttcggcttcacaaaggtggtgtgatcgcctttgccgatattggtgatcagtgcactgtattggttttgcaggatatcctgcaattcacagcagtgaacggtacgaccaataatacggcccagcgtggagtgcagctgtgccacttccagcgtgttgccagtcagtttctgataaatcgcaacgatttcattcagtttgttctgggtagattcgcgacctgccgccagtttcaccagcatattagccagtggccccacttctaccgttttgccgtagaaagtcggacttttcacccaggaatatttcccgtcgtcagaccaaccatcataagccggaatggtggtgccttcccacggtgcctgcggcgcttcgtctttataccaggagtgcttcgcgctttcctgaatgcctttgatcaggtattcatcggaatgagaagtgatcggacgatagctggacagatccgcattctcaatgtagccgcccgggaacaggaagctgccgtttttactgtcggtcgggaattccggcacgctcaggtagttcaccgcacctttaccgcgtgtcagccattccgggtagaacgcggcaataactgcggtatcaaccttataaacctgctcaacaaagtcgctcagtttgtcgatgaaagacttgatgtacatcaggcgctcaaggttcagcacgcccaaaccgtcgaggttgatcgggttcgcgacaccacctaccgccaggttctgaatgtgcggcgttttaccgcccagcagcgccacgacgcggttagcgtcacgctggcactccaacgcttgcaggtagtgcgctaccgcaatcaggttcacttccggcggcagtttcatcgccggatgaccccagtagccattagcgaaaatacccaactgaccgctggcaaccagatctttgatcttgttctgaactttggtgaactcttccggactgttcaggtgccaggtgctaacgcctttcagcatttcggaggctttggttgggtcagcttgcagtgcagaagtgatgtccacccagtccagcgcgctaagctgatagaaatgaacaatatggtcatgcgtggtgtgcgcagccagaatgatgttacggatgtattgcgcgttaaccggaacgtcgatattcagcgcactttctgccgcacgaacggaagacagcgcgtgagtggtagtacatacgccacagatacgttgcacaatcatccatgcatcgcgcggatcgcggtttttcacgatctcttccatgccgcgccacatggtaccggaagcccatgctttgctaacgacgccattttcgatttcgcaatcgatgcgtaaatgcccctcaatacgggttaccggatcaatagtaattctctggctcatgctttgctcgcctcatgacgattatgatcgttttgttttaaaggaggaagtatcggcagtagacgaatgagtacgatgtaagcgcaaatctcaatagccacaaaaccaatagaaatcaacagttcttcccaggtcgggaagtaggcgtaaccgccgcccgggttgaatgccaccaggctataggtcagacgccaggttgcacaacctaacagtgcgctcagtgcactcaggaacagcatgcgggaatcattacgcagcttcgccacacgcagaacgaccagcgggaagagcatcagcaggacttcaatccagaacatcacggagtagaagtcaccggcaaacgctaagctcagcttgtcgcgatagataagctcgccaaagcgcagcacgatgaaaatcgccagcaacacactgatggtgttggtcagcttaacaaacagactcttttcatccggaccgttgccacgcagacccgcctgcaccaggctaccttcaaagatgacaatgctgaagcccatgatgaacgccgtcagcaggctgaacagcggcaacatttcatagctctgccacaacggatgcaccttgtagcccgcgctgatcatcaggctccccatactagactggtgcatggtcggcagcagcgcaccgagcgcgatgatgaagaacatcaccttgtttagtcgctgtaggctcaccttccaccccagacgttcaaacagtgccggagcaaactccagtgccatcacgccgatatagatggtcatacagaccgccgtctcgaacagtacgctgttcacgttgaagtgacccggaatgtagaagtacggcaggttccagtagcgacccacgtcgatagtgatgctcaagccacccagactgtaaccaaacagactcgccaacagcgccggacgcaccagcggatggtattgcccacggttaaagacgtataccgcccacgccagcgcccagccgccacaggcaaagccggtgccaatcagcaggtcaaacgcgatccacacgccccacgggaagccgccgttcaggtcagagacagagcccagaccgaacaccagacgcttcacaatcaggagcatacagatgacgattaacggtccaaaaatcatgaccggtttactgatgattttgccgcccagcggttgtggatcatgactcatgatcgtctcctccgtcgtgattattcaactctcatgatcgtctcctccgtcgtgatggtcgtttttggtgttgcgacgaaccagcacggttaagcccgccagcacagccagtggtagcatcatgcctttatacagggtgtgttgaatattttcggaacgcgcaccggtagaaagatcgtccagtttcggcaggtcgagattttcataaggcacacccgtcagtaccagaacctgagtaccgccgccctctttctcgccgtacagatgcggataatatttcggcaccgtatgcaggtaagtgtcgccagatttcagcgtctgacgcggatagtggtattcgctgccaggcttcagcgccagacgttttttcgcctccgccatcagctcttcacgcgtaccgaaaatcaccgcgcccgccgggcacacttctacgcagccaggtagaccgcctttatcgagacgttccacacctttctggttgcacagctcgcacttatgcagcgcaccaaacgggttgttgtagtcgtacttcggcacgttgtacggacaggcgaccatgcagtaacggcagccggtgcacacatctttgtcgtaatggacaatgccggttttcggatcttttttcagtgcagagaccgggcacacagagacacagttcggatcgacgcagtgcatacactgtttcttaatgtacgcgtagccgttctcctcctggtctttgttgacccctgtgccgctggtccacacctgaatgatgttattggtatacgggctcagtttgtcgttgttgctccaggtctgttccccttgcgggttacgttcagggaaattgatatcctgacacttggtgacgcaagcctggcagcctacgcacaaggtgctgtcgtacaacatccccaggcttcccggaattggcgggcggttttcagcagccgcatgactgacagacggcagcgcgcccgtcagcaatgccccgcaggaggctgctttaataaaattacgtctgttcacggttattctccccgactgtcagcgttatctttcttttgctgacgacccagttcacgcaccgccatcacgctgacaccggcaaccaacccaaccacaccgccgagcaaaccaatagcgcctgcagagacgttgccgccctctttagcgttaacatccggtttctgactacgcggagtttgattttcgacgttggcaagctgatggatgcctttatggaagccgataccttcttcgttacagccatagcaagggtgaccaatcgccaccggccacacaccgccaacatcgcagaattgcagcgtactgcagttgccgtaagtttctggccctttacagccgaggtggtacaggcaccagccttcgcggtggccttcatcaccgaactctttggcaaaacgaccagcatcgaagtgcgggcgacgttcgcagtgttcgtgaatcagacggccataggcgaaggtcggacggtttttgtcatccagtttcggcggtttgccgtaagtgatgatgtgcgcaacggtcgcgaggaagttgtgcgggttcggcgggcagcccggaatattgataacggttttgcctggcagaacttcttgcaggctgactgcgccagttgggttaactccagctgcggcaacaccgccccacgcagagcaggaaccgatagcgataatggctgctgcgccttccgccgctttgcggatgtgatccacaatcggctcaccggcaaccatgcaataaataccgttatcttttaatgggatggaaccatccaccactaacacatactgccctttgtacttctcgagagcgttatgtttgttctcttcgacctgatgaccgaaggcggcggaaagcacttcgtgatactccagagagatagtctccagtacgaggttttctaccgttggatgcgttgcacgaagcagagattccgtacaaccggtgcactcctgcgcgccaatccagataactggcggacgctgcgggttagtaacgctttcggccatctctgcagcggctttgctacttaaccccatggtggcggctaatgctgcacaaagcttcatgaaatcacgacggttaatgccgtgagaatggatgagggtgttatctccagtcatttatagttattccgttgcgaagacctggcatatattttgcctcaatcgcaaaatcaataatgcgatcgatgcgccatttaccacacatttattatggttatcgatatcatgatactgcggcggggcgctaaaacgaagggaagaagcattagtgtaattaattaaagcaagataatacgtatgtttgatcaattttcgaggcgataaccggccataaaaaagcgcaacgtagaacaggaattattctcacgaaagaaatccattaccatctctttatccagtccatagcggcgcgtcagaatacccgcttcccaggcgctaagctggcgatctccggtcttttcgtacatccggtgactgtagcctaatacaaaaccgcgtttataatcggcacagaattttgtcacattaaccgcactgtcggcatgcgttgcttttaatcccgccattaagcctttaccaaaatggttattcatcgttcacctcattcgctatatattgtcatatatagcgatattttaggcaaagaacgacttttgcgcacgctattttttcatgcttgtttaagacgtaatcccgtaagagataaacctatcaggagagatatttatcgaaccatttcagtgtcctttgccaggcaagatcggcggcagatttgtcataacggggcgtggaatcattatggaatccgtgattaacccccggatagatatacgcctcataaaccttattattggctttcaacgccgcctcgtaagcaggccagccctcgttgattcgggtgtccagttccgcgaagtggagtagtaaaggcgcttcaatcttcgccacatcggcagtgggtgcctgacgaccataaaacggcaccgcgcaggccagttccggatacgcgacagccgccgcgttgcttacgccaccgccatagcaaaatccggtaatacccactttgcctgtcgcttgcggatagcgttgcataaactcaattgcggcaaagaaatcattcatcagtttgttggatcaacctgctgttgcagctcacgacctttatcatcatttcccggataacctccaacggaacttaagccgtcaggtgccagggcgatataccccgccttcgccactcgccgtgccacatcttcgatatacggattcagtccacgattctcatgcaccaccactacggctggcgttttgccgctcatctttgcgggcttcaccagataaccccgcacctcgccgtgaccatttgggctaggatacgtgatgtactcagcaacaatttccgggtcggtaaactctacctgagtcgccagcgcataatttggcttgagcaaatcaaacaacgctaatgccgtcatcccgcctaccgcacttcgccgcaaggttgaggaactcacgtttcgagattttcccgtgagcgtaatagtcatagtaatccagcaactcttgtgggaaatctttggcggttaaacgcggcatcgttgcactcctcagttggtgtttttttaagcaaagcataagcacgtatttttgcccagtttttcgtcactctgtgagccagactacgggatacgcgctggcgaatcgctaaactagaaacattgtttcgaaattgaacggtggaaaggagaggtcatggtctggttagcgaatcccgaacgttacgggcagatgcaataccgctattgcggaaaaagtggtttacgcctgcccgcgttaagcctcggtttatggcacaatttcggtcacgttaacgcgctggaaagtcagcgtgcgatcctgcgtaaagcgtttgatttgggcattacgcactttgatttagccaacaattacgggccgcctccaggaagcgcagaagagaactttggtcgcctgctgcgggaggattttgccgcttatcgcgatgaactgattatctctaccaaggctggctacgatatgtggcccggcccttacggctctggcggtagtcgtaaatacctgctcgccagcctcgaccaaagcctgaagcgtatggggcttgagtatgtcgatatcttttactctcatcgcgtcgatgaaaatacgccgatggaagaaaccgcctctgcgctggctcatgcggtacaaagcggtaaggcgctgtatgtcgggatctcctcttacagcccagagcggacgcaaaaaatggtcgagttgctgcgcgagtggaaaattccgctgttaattcatcaacctagctacaatttactgaaccgctgggtggataaaagcggcctgctggataccctgcaaaataacggcgtgggctgtattgcctttactcctctggctcagggattgctgaccggaaaatatctcaacggcattccgcaagatagtcggatgcatcgtgaagggaataaagttcgtggtctgacaccgaaaatgcttaccgaagccaacctcaacagcctgcgcttattgaatgaaatggcacagcagcgtggacaaagtatggcgcaaatggcgttaagctggttgctgaaagatgatcgcgtgacgagcgtattgattggtgccagccgcgcggagcaactagaggagaacgtgcaggcgctgaataatctgacatttagcaccaaggagctggcgcagattgatcagcatatcgccgatggcgagctgaatctgtggcaggcgtcttccgataaatgacctgttaataacgggcgcgcgaaccgcgcccgaatcagatcagtgattatgacgagtcagtcggtcaagatagcccatcacaaatgcagaaagcacaaacgtcagatggataatgacgtaccacatcagtttgttatccgggacatttttcgcatccataaagacgcgcagtaagtgaatggaagaaattgccacaatgctcgctgctactttgtttttcaggctcgttgcgtccattttccccagccagttcagcttctctttgttctcggagatatccagctgactgacgaaattctcataaccggaaaacatcaccatcaccagcaaaccgccaaccagcgtcatatccaccaggctcagcaacacgaggatcaaatcactttccgccatgctgaagatattcggcagtacgtgaataatctcctggaagaacttcagcgccagggcaactaacgccaggctaaggccaaagtacacgggggcaagcagccagcgagaagcatacattgcattttcaagaaaacgttccatacattcctgtcgtgtagttaaaacgggcaacagtatatcgcaattgagtaaacagcacgcaacagcaaatcaacatatacgttaaacctttgtcgcataattctgaggtttagggatcttcctggttcccttatcaacgcatcgagaacgtctacccttaaaggacgttgaacctgaagggagaaaaacgatgtctcatttaaaagacccgaccacgcagtattacactggtgaatatcccaaacagaaacaaccgacgccaggcatccaggcgaagatgacaccggtaccggattgcggcgagaaaacctatgttggtagcggtcgcctgaaagatcgtaaagcactggtgacagggggcgattccggaataggtcgcgctgccgccatcgcttacgcgcgtgaaggggctgacgtggcgatcagttatcttcccgtggaagaagaagacgctcaggatgtgaaaaagatcattgaagaatgcggacgcaaagccgttctgctgccaggcgatttaagcgatgagaaatttgcccgtagcctggttcacgaagcgcacaaggcgttaggcgggctggatattatggcgctggtcgccgggaaacaggttgccattccggatattgcagacctcaccagcgaacagtttcaaaagacctttgccattaacgttttcgcgctgttctggctaacccaggaagcgatccccctgctaccgaaaggtgcaagtatcatcaccactagcagtatccaggcataccagccaagtccgcatttactggactatgcggctacgaaggcggcgattctgaactacagccgtggcttggcaaaacaggtcgcggagaaaggtattcgggtgaatattgtcgcgccaggcccgatctggacagcactgcaaatttccggcggacaaacgcaggataagatcccgcagtttggtcagcaaacgccgatgaaacgtgcggggcaaccggcggaactggcccctgtatatgtttatctggcaagtcaggagagcagctacgtcaccgcagaagtgcacggcgtgtgcggcggcgagcatttaggttaaaaaaatgcccggttgtgaaaagcaaccgggcatcattgtgaattcactcttacctgatgtggcgaaaacgccttatccgcctacaaacgcatgaagattcaacatgttgcaatagattttgtaggcctgataagcgtagcgcatcaggcattgagcacctaatgccggatgcgtcgtgaacgccttatccggcctacaaacgcacgaagattcaacatgttgcaatagattttgtaggcctgatgagcgtagcgcatcaggcaattctactttacttcgctttggcggtttcttcgccgaccagacctatcttcaggtaacccgcctgatgcagcgtatccattaccttcatcaacgtctcgtaatcgacggttttgtccgctcggaagaagatggtggtgtctttcttgccttcggttaacgcattcaacgccgtaatcattgtttcatcggtgaccggatcgttaccgataaacatgctgttgtctgccttcacgctcagataaaccggtttttccgggcgcggctgcggcgtgctggtagaagcaggcaagttcaccttcacatctaccgtcgctaacggtgccgccaccataaagataatcagcagaaccaacatcacgtcgataaacggcgtcacgttgatatcatgcatttcgccgttatcgtcgaggttttcgttaagatgcattgccatcggatattatcctgcgcgtaatttttgtgcgacacgaaccggatgcgcagcggcgctggcttccagatccaggtcacggctttgcagcaacaatacctgcgctgcaacatcacccagcatcgctttaaagccgccaatctggcgtgcaaatacgttatagataacgaccgcaggaatcgctgccacgaggccgattgccgttgctaacagagcttctgcgatacccggcgcaacgactgccaggttagtggtctgcgtttgcgcgataccaataaagctgttcatgatgccccagaccgtaccaaacagaccaacgaacggagaaatcgcgccgatggttgccagatagccgttaccgcggcccatttgacgacccactgcggcgacccgacgctccagacggaagctggtacgttctttaataccttcgttatcgtcgctgccttcactcagttccagctcattctgcgcttcattgagcaaatgcaggcttaagcttttgctaccaaaatcagcggcgatatcgttggcctggtttaaggaacgcgcttcagccagcagttgctgctcgcgcttaaggcgacgcttctgattgaagaactctacgctcttactgaagaagattgcccaggtgactacggaggccaaaataagcccaatcatcacgcacttaacgacaatatcggcgtgctgatacataccccagacggaaaggtccgtctgcattaaattattacccactgtgtatctccaggacgcaagtcacaaaatctgcgcataataatatcaaaacgacgtcgaattgatagtcgttctcattactatttgcatactgccgtacctttgctttcttttccttgcgtttacgcagtaaaaaagtcaccagcacgccatttgcgaaaattttctgctttatgccaattcttcaggatgcgcccgcgaatattcatgctagtttagacatccagacgtataaaaacaggaatcccgacatggcggacaaaaagcttgatactcaactggtgaatgcaggacgcagcaaaaaatacactctcggcgcggtaaatagcgtgattcagcgcgcttctagcctggtctttgacagtgtagaagccaaaaaacacgcgacacgtaatcgcgccaatggagagttgttctatggacggcgcggaacgttaacccatttctccttacaacaagcgatgtgtgaactggaaggtggcgcaggctgcgtgctatttccctgcggggcggcagcggttgctaattccattcttgcttttatcgaacagggcgatcatgtgttgatgaccaacaccgcctatgaaccgagtcaggatttctgtagcaaaatcctcagcaaactgggcgtaacgacaagttggtttgatccgctgattggtgccgatatcgttaagcatctgcagccaaacactaaaatcgtgtttctggaaagcccaggctccatcaccatggaagtccacgacgttccggcgattgttgccgccgtacgcagtgtggtgccggatgccatcattatgatcgacaacacctgggcagccggtgtgctgtttaaggcgctggattttggcatcgatgtttctattcaagccgccaccaaatatctggttgggcatagtgatgcgatgattggcactgccgtgtgcaatgcccgttgctgggagcagctacgggaaaatgcctatctgatgggccagatggtcgatgccgataccgcctatataaccagccgtggcctgcgcacattaggtgtgcgtttgcgtcaacatcatgaaagcagtctgaaagtggctgaatggctggcagaacatccgcaagttgcgcgagttaaccaccctgctctgcctggcagtaaaggtcacgaattctggaaacgagactttacaggcagcagcgggctattttcctttgtgcttaagaaaaaactcaataatgaagagctggcgaactatctggataacttcagtttattcagcatggcctacagctggggcgggtatgaaagcttgatcctggcaaatcaaccagaacatatcgccgccattcgcccacaaggcgagatcgattttagcgggaccttgattcgcctgcatattggtctggaagatgtcgacgatctgattgccgatctggacgccggttttgcgcgaattgtataacattgccacttttggacaattttgcagacattttattgtgaaaagtcttaaattgttgcgtccgggatcaaggcgtcccggacgattcaggagtacaataggcagataaaggcttaaacgctgttccacaggaaagtccatggctgttattcaagatatcatcgctgcgctctggcaacacgactttgccgcgctggcggatcctcatattgttagcgttgtttactttgtcatgtttgccacgctgtttttagaaaacggcctgctgcccgccagttttttgccaggcgacagcttgttgatactggcaggcgcattgattgcccagggggttatggattttctgcctacgattgcgattctgaccgccgcagcaagtctgggctgctggctaagttatattcaggggcgctggttagggaataccaaaacggtgaaaggctggctggcacagcttcctgctaaatatcaccagcgcgccacctgcatgtttgaccgccacggtctgctggcgctgctggctggacgttttcttgcatttgtccgtacgctgctgccaaccatggcgggaatttccggtctgccaaaccgccgcttccagtttttcaactggttaagtggattgctgtgggtcagcgtggtaaccagttttggctatgccttaagtatgattccgttcgttaaacgccatgaagatcaggtaatgacgttcctgatgatcctgccaattgccttgttaaccgctggcttgttaggcacgctgtttgtggtgattaaaaaaaaatactgtaacgcctgacgattttccccgttcccggttgctgtaccgggaacgtatttaattcccctgcatcgcccgcattcttgccgcatcttcccccggcgtcacaccgaagtaacgtttaaactcacggctaaattggcttgcgctttcatagccgacgcgcatcgctgctgcgctggccttcatgccgtcatggatgatcatcatccgcgccttatgcagacggtaattcttcaaatactgcaacgggctggtactggtgacagacttaaaattatggtggaacgcgcttacgctcatgttggcttctgccgccagttgctcgacgctcaggttttcggtgtatttattctcaatccgtttcagcacgcggctaatcagactgaagtgagtctggcgactgaccagcgccagtaacgcgccgccgcaaggtccggtcagcacgtagtacagaatttcgcggatgatctgtttgccgagaatacgcgcatccagtggtcgctccatcacgtcgagtaaccgctccgccgcgcataaaatctcttcacttaacgtggcggagttaatcccgctggctgccatgctcggctggaaatgctcatcttcgccaatgtccatcaacagttcctgtaactgcaaaatatcgacattgagacgcaaccctgccagcggcacctcactcgtggcataggtttcgcactcaaacggcaacggcaccgtcagcagcaggtattcattggcatcataacgaaacacgcgttcattgatataaccgattttatgcccggaaaagagaattatgatgccaggctcgtacatcaccggtgtacgtgcgaaaggcgtctcgccatacaacaaacgcacatcgggcaacagtccactcaaactattttctttatttttcagtttattaactttatccgccagcaagcggcaaatctcttcacgtttcatatcgcgtaatttcttaggaataatgcggcaattactttgtgcgcaattttgtagcatttctccagcactctggagaaataggcaagacattggcagaaatgagcattgagagccagggcgctggcgatcacaatgaaaaacatcaggcagatcgttctctgccctcatattggcccagcaaagggagcaagtaatgaacaactttaatctgcacaccccaacccgcattctgtttggtaaaggcgcaatcgctggtttacgcgaacaaattcctcacgatgctcgcgtattgattacctacggcggcggcagcgtgaaaaaaaccggcgttctcgatcaagttctggatgccctgaaaggcatggacgtgctggaatttggcggtattgagccaaacccggcttatgaaacgctgatgaacgccgtgaaactggttcgcgaacagaaagtgactttcctgctggcggttggcggcggttctgtactggacggcaccaaatttatcgccgcagcggctaactatccggaaaatatcgatccgtggcacattctgcaaacgggcggtaaagagattaaaagcgccatcccgatgggctgtgtgctgacgctgccagcaaccggtagtgaatccaacgcaggcgcggtgatctcccgtaaaaccacaggcgacaagcaggcgttccattctgcccatgttcagccggtatttgccgtgctcgatccggtttatacctacaccctgccgccgcgtcaggtggctaacggcgtagtggacgcctttgtacacaccgtggaacagtatgttaccaaaccggttgatgccaaaattcaggaccgtttcgcagaaggcattttgctgacgctaatcgaagatggtccgaaagccctgaaagagccagaaaactacgatgtgcgcgccaacgtcatgtgggcggcgactcaggcgctgaacggtttgattggcgctggcgtaccgcaggactgggcaacgcatatgctgggccacgaactgactgcgatgcacggtctggatcacgcgcaaacactggctatcgtcctgcctgcactgtggaatgaaaaacgcgataccaagcgcgctaagctgctgcaatatgctgaacgcgtctggaacatcactgaaggttccgatgatgagcgtattgacgccgcgattgccgcaacccgcaatttctttgagcaattaggcgtgccgacccacctctccgactacggtctggacggcagctccatcccggctttgctgaaaaaactggaagagcacggcatgacccaactgggcgaaaatcatgacattacgttggatgtcagccgccgtatatacgaagccgcccgctaagctttttacgcctcaaactttcgttttcgggcatttcgtccagacttaagttcacaacacctcaccggagcctgctccggtgagttcatataaaggaggaacgtatggctaatccaaccgttattaagctacaggatggcaatgtcatgccccagctgggactgggcgtctggcaagcaagtaatgaggaagtaatcaccgccattcaaaaagcgttagaagtgggttatcgcagcattgataccgccgcggcctacaagaacgaagaaggtgtcggcaaagccctgaaaaatgccagtgtcaacagagaagaactgttcatcaccactaagctgtggaacgacgaccacaagcgcccccgcgaagccctgctcgacagcctgaaaaaactccagcttgattatatcgacctctacttaatgcactggcccgttcccgctatcgaccattatgtcgaagcatggaaaggcatgatcgaattgcaaaaagagggattaatcaaaagcatcggcgtgtgcaacttccagatccatcacctgcaacgcctgattgatgaaactggcgtgacgcctgtgataaaccagatcgaacttcatccgctgatgcaacaacgccagctacacgcctggaacgcgacacacaaaatccagaccgaatcctggagcccattagcgcaaggagggaaaggcgttttcgatcagaaagtcattcgcgatctggcagataaatacggcaaaaccccggcgcagattgttatccgctggcatctggatagcggcctggtggtgatcccgaaaagcgtcacacctagtcgtattgccgaaaactttgatgtctgggatttccgtctcgacaaagacgaactcggcgaaattgcaaaactcgatcagggcaagcgtctcggtcccgatcctgaccagttcggcggctaacatgcaaattctcccggtggcggtaatgttccgctaccggacttttcagaaatcatttattcccctcgcgtcccgcccgttgttactcttccttgttcaggaatgccaaatataaggacatcatcatgcagagccggaagctcttaaaagaacaactcatctatatccgggataaacgcaacggagaggtgaaaaacagatgaaaataatacttctgtttttagcagccctggcaagttttaccgtacacgcacagccccccagtcagaccgtagaacaaacagtccggcatatttatcagaactataaaagtgatgccactgccccttattttggtgaaaccggagagcgggcgataacttctgcgcgtattcaacaggcgcttaccctgaacgacaatcttacgctgccgggcaatattggctggctggattatgatccggtttgtgattgtcaggattttggcgatctggtgctagaaagcgttgcgataacccaaactgacgccgatcatgccgatgccgttgtgcgctttcgtatctttaaagatgataaagaaaagaccacgcagacactgaaaatggtggcggaaaatggtcgttgggtcattgacgatattgtcagcaatcatggcagcgtcttacaagcagttaatagcgagaatgaaaaaacgctggccgctttagctagcttgcaaaaagaacagccggaagcctttgttgccgaactctttgaacatattgctgattatagctggccgtggacgtgggtggtttccgactcttaccgccaggcggttaatgccttctataaaaccaccttcaagacggccaataatcccgatgaagatatgcaaatagaacggcaatttatttacgacaatccgatctgttttggcgaagagagcctatttagtcgcgttgatgaaattcgagtcctggagaaaaccgccgattccgcccgcattcatgttcgttttacgctgaccaatggcaacaacgaagagcaagaactggttttacagcggcgcgaaggcaagtgggaaatcgctgattttatccgcccgaacagcggcagcctacttaagcagattgaggcaaaaactgccgccagattaaagcaatgagctgaattaaataacaattagccggaacaataaataaaagggaacactatatgaaaacgattttcaccgtgggagctgttgttctggcaacctgcttgctcagtggctgcgtcaatgagcaaaaggtcaatcagctggcgagcaatgtgcaaacattaaatgccaaaatcgcccggcttgagcaggatatgaaagcactacgcccacaaatctatgctgccaaatccgaagctaacagagccaatacgcgtcttgatgctcaggactattttgattgcctgcgctgcttgcgtatgtacgcagaatgataaaaaaatccccggtagcgtgtcagttgccggggatattttttaacgtccaaccgccgctttaggccgtttcttcgcaccagcattcaccggacgagattgcgtagagctcgctttttttgccgtagcaggcgtctgacgctgggtcgccatcggcgtatgtttcgtcaacgccggacgggtattgcggttctggcgacgagcttcacgcatctcttcaatggttggcgcaggcactaagcaatcgcgacggctgccaatcagatgctttttgcccatcgcttccagcgcctggcggattaacggccagtttgccggatcgtggtaacgcaacaacgctttatgcaaacgacgctgtttgtcgcccttcggtacgaagacgtcttcgctcttataaccaatcttcgccagcgggtttttcccggtgtaatacatggtggtactgttcgccagcgggctcggatagaagttctgcacctggtcgaggcggaagcggtgctttttcagccacagcgccagattcaccatatcttcatcacgcgtaccggggtgcgcggagatgaaataggggatcagatactgctctttacctgcctgtttactgtaagtatcgaacagctctttaaagcggtcatagctgcccatgcccggcttcatcatcttgcttaacggcccttcttcggtatgttccggggcaatcttcagataaccgccgacgtgatgggtcgccagttctttgatatagcgcggatcttctacggctatgtcataacgcacaccagaggcaatcaggatctttttaatgcctttcagatcacgcgcacggcgatagaggttgatcgttggttcgtggttcgtgtccatgtgcggacaaatatccggataaacgcagctcaaacggcgacaagtttgttcagcgcgtgggcttttgcagcgcaacatatacatgttggcagttggcccaccaagatcggaaatcacgcccgtaaaacctggaacggtgtcgcggatcgcttcgatctcattaatgatgctatcttcggaacggctctgaataatgcgcccttcgtgctcggtgatagaacagaaagagcagccgccaaagcagccacgcataatgttgacgctaaaacggatcatttcgtaagccggaatacgggcattgccataggccggatgtggcacgcgcttgtatggcagcgcaaaaacgctgtccatctcttcggtagaaagcggaatagcaggcgggttgatccacacatagcggtcgccgtgtttttgcatcaatgcgcgggcacagcctgggttggtttcgtggtgcagaatacggctagcatgggcgtacagcactttatcgcccttcactttctcgaaagaaggcagcaacacgtaggttttttcccacggtttcgggcgcggtggctgcacggttacggctttggcttcctgctttttcggtgccaccggtttgttatccgcgcacggcaaatcttcaccatacggatgcgggattgggtcgatttttccaggggtatcaagacgggtggaatccacgccgctccagccaggcagcgcctctttcacgataatcgcggtattacgcacatcgcggatttcactaattggctcgcccatcgccagacgatgcgccacttccaccagcggacgctcaccgttaccaaacatcagcatgtcggctttgctatccaccagcacggaacggcgcacggtatcggaccagtaatcataatgcgcggtacggcgcagactagcctcaataccgccgaggatcaccggtacatctttccacgcctctttacaacgctgggtataaaccagtgtggcgcgatccgggcgcttacccgcgacgttatccggcgtgtaggcatcgtcatgacgtaaacggcgatcggcggtataacggttgatcatgctatccatgttgccagcagtaacaccgaaaaacagattcggtttacccagacgcataaagtcgtctttgctgctccagtccggctgggcgatgatcccgacgcgaaagccctgcgcttccagcatacgaccgcaaatcgccatcccgaagcttgggtgatcgacatacgcgtcgccagtaaccaaaatgatgtcgcagctatcccagccaagttgatccatctcttcacgagacatcggcaaaaacggtgccggtccaaaacaggcggcccagtactgcggccaggagaacaggtcgcgatccggttggatcagggagatagagctcattttgcttccagaaatgataaaaaaataatcaaaggccggggattataagccggaacgaaagagaaatcgaaaggtattccatactcgccctcctcgggcgagtatgaagattacggtaccggattgaccaacagttgcccaatgctgccacggtccgccatttccagcgtctgactgttgaagtagaacgggaagtgcgcccaggaaggctgaccgaaataaacaagcagctccacttgtccgtcaacccaaacggtatctttccagcctctgtcttccgggaacggcatcgcgccattcacgttacggatctggaacattacgccttcaatatggaacgcttgcggctcgtccgcgcgtaccgtccagcgttcccacgttccttgctgcgcggtgacatcaatacggttgacgtcccacagctgtccattaatacccgggtcatcacccagactgatatcgcgactgcgaattgggctaccagccatgatttcagttggcagcaagcgcatcggaagactgtctgtgaccagcggcagaaggccggttgggcgcagcgttagcaccagggtagaaaccagaatactggatggctcaaagaagccacgaatacgatcaacaatgctcgccgcttcgccacaggtgatgctcacttcatcgccgttgctcatatccaccagaatctcgcggcgctcgcccggtgccaggctaagttgcttcacgcttacaggagcaggcaggaatccctgatcgccagaaatcacatgtaacgggcgaccatcgttcatctgtagttgatagcgacgagagttgctcgcgttcagcagtcgcaagcgcacccagccacggctgacttcaacgtacgggctttgtacaccgttaaccagcagcgtatcaccaacaaagccgccgcttcccggttcgttgtattctggcgtaccaaagttatccagccgtttatcctggataatgaccggaaaatcatccacaccataatggttggggataggcaggctcttgctgacttcatcttccaccagccacattccggcaaggccgttatagacctgctgagccgtgcggttgggagtattggcgtgataccacagagtagctgcgttctggcgaatgggcagtacgggtgcccagtcagcgtttgggctcatcatccgtgccggaccgcccatcagcgggcctggtacctgtagcccggccaccgtcatactgacattttctgtcaggcggttgctgtaaataagcttaacatcgtcgcccttccagacgcggatagtcggccccaggtaacgaccattgattccccagacgctcgcgcgtgtccctggcgtaaaactccagtgcgcacgttgtacagtcataaacagcggttgcccacggcgagattcaagtagcggcggaacgggtagcggttgctgttgcccggctgcgctggccttcaggggaacagcgcctgcacaaagtgcaatcccgcttgcctgaatgaactgacgccgactgagactcatatttgctccatgtaaaactggctaaagtaataccgtgcaggaaagtgttccccgcaaaaatacagattgccgacttaaacttttccggcggcttcgcgttctgcgacttctttatcgagctcggcgattttttgttccattatgctacgacaatgggcagccagctcacgaacctgatctttgccatactgactgacgtcaattggcggcagcatttcgacaatcaccagaccgttgtgcagtcgattaagattaatcttattgctagttgtagagacgcacacgggaataatcgggacgcccgccgcaattgccgcgtgaaatgctccagtcttgaacggtagcaggccgcgaccacggctgcgggttccttccgggaacatccagatggaaatacggcgttttttgaagtgattcactacttccgcaatggtgccgtgagctttagtgcgattgtttctgtcgatcaataagttgccggttaaccagtacaactgcccgaagaaggggatccacagcaagctctttttacctaccgtcaccgtcggcggttgcacgatgttgcttgctgtcaccatgtcatagttgttctggtggttagcgatatagatagcattgccgtagctttcagcgtctgtaggtttacggcactcaactttcaggccaaacagcggcgcaagacggccaaacatatgcccaaaggtggccacatgtttcgggttacgcgggctgaaaaggcagtaaatggagccgaatacacagactaagatgctgtaaatcacggtaataataagacgaaagatatatagcataacaccctctgaaggtctgagagactggcattgtacgtcacctgaaatcaggttagggcattgttaaaagccgctctctggaaaagcgtattgttaatcgcaacgcatgaataaacaacggtttcaagggaatttttatcgtttccgggggttgaatacgctgccggatgacgacttaacgtttcatccggcgttccttgcaagcgggaggaaacagcgccctccccggcatattactcttcgctatcaccgctgctggcacggcgaggagagtcgatctcaacacgatcgatacgctgcaaaccgcgcatcaacgtaccgcggcgtccacgttcgccagtgactttctgtaactcttccgggcgcagtttaattttgcgtttcccaacatgaatggtcagcgtgctttgcggcggcagaacgtacaattgcgccagaccatcttctccacgcgcggcttctgcgcttggaatgttgataatcttgttgcctttgcccttgctcagctgcggcagatcacttaccgggaacatcaacatacggcctgcctgagtgattgccagcagcatatcggaagcatcttcaatcaccaccggcggcataacatgggcattttccggtaaggtgatcaaagccttacctgcacggttacgcgccaccagatcgttaaaggtgcagacgaaaccgtaacccgcatcggaagccatcagcagtttctgatcgtcgctttccatcagcatatggtcaacggtcgccccaggcggcaacgttaatttgccggtgagcggctcgccctgaccacgcgcgctcggcagcgtaatcgggtcaatggcatagctacgaccggtggaatcaacaaacactaccggttggttgctcttacctttcaccgccgctttgaagctatcacccgctttataattcaggcccggcgcgtcgatatcatggcctttagcgctgcgtacccagcccatctggctcagcacaatggtgacaggttcagacggcagcatgtcgtgctcgctcatcgctttcgcttcttcgcgttcctgcaacgggctacgacgatcgtcaccgtaggcttgcgcgtctgcctgcagttctttcttcagcaggttattcattttacgctcggaagccaaaatgccctgcaactggtcgcgctctttttccagttcactctgctcaccgcgaatcttcatctcttccagtttggcaagatgacgcagtttcagttcgaggatcgcttccgcctgggtttccgtaaggccaaaccggctcatcagcgccggtttcggttcatcttcattacgaatgatctcaatcacttcgtcgatattgagaaacgccaccagcaaaccttcgaggatatgcaggcgcttgaggactttctccagacgatagttcagtcggcggcgcacggtatcgcggcggaacaccagccattcggagaggatttccagcaggtttttcaccgccggacgaccatccagaccgatcatattaaggttaatacgatagctcttttccagatcggtggtagcgaagaggtggttcatcacctgatccatatccacgcggttggaacgcggcacaatcaccaggcgggtcgggttctcgtggtcagattcatcgcgcagatcgtcaaccatcggcagctttttgttgcgcatttgcgcagcaatttgctccagtacgcgcgcaccactaacctgatgcggcaatgcgctgataaccaccgcgccatcttctttcttccacaccgcgcgcatacgcacactaccacgtccgttctcgtagattttacggatctcggcgcggctagtgataatttccgcttcagtcggataatccggcccctgcacgatatccagcagctgatcgagcgtggttttcggctggtcgattaatgcgattgccgcctgagccacttcacgcaggttatgcggtggaatatcggtcgccatgccgacggcaataccggtggtgccgttaagcaaaatgtttggcagacgggcaggtagcattttcggctcctgcaaagtgccgtcgaagtttggcacccagtcagccgtcccctgccccagctcgctcaatagcagctcggaatatttgctcaaccgggattcggtgtaacgcattgccgcgaagcttttcggatcgtccggcgcgccccagttcccctgaccatcaaccagcggataacggtaagagaacggttgcgccatcaggaccatcgcttcataacaggcgctatcgccgtgcggatggtatttacccagtacgtcaccgacggtacgggcgctttttttaaatttggcgctggcattcaggcccagttcagacatcgcatacacaatgcggcgctgaacaggtttcagaccatcaccaataaacggcaacgcacggtccatgatcacgtacatggagtagtttaagtaggcgttttccgtaaattcatgtagcgcaaggcgctctgccatatcgctcattaattctgattcctcaacttattcgccagccttcaaaggggcaatattgccggagatactacattatctgccgcgtcgagtcacaggagatcaacgtgaatagcgccgccggacgtgctccgacggcgataaaggcatcaatgtgccttgatatacaactctttgctgtagacataatcctggggattatgcagcggaaaaccgccaacgtagggtttaagcagtttgattaacggctgatagtagataggaatcagcggtgcctgttggttgatgatcacttctgcctgctgatacaacgcattacgctttgtcgcatcagtgatctgcgtggcctggtttagtaaggcgtcatactgcgcatttttccagtgaccgacgttttcttcactatcgcttttgagcgtgttcaggaagctggaagcatcattgtacgtcgcatcccagctctgccgagacagcatgaaatcaccggctcgtcgggcatcaagataggttttccactccattgtgcgcagcgtcacctgtgcacccagccattttttccattcggaagacaacgctatcgcggtcttttcatgcagatcgtacttgttgtagaacagctcaaagcgtagcggatgagaggcgtcgtatcccgcctgtttcagcaaggcttttgccatcgcgacgcgctcactcattggcttttgcagttcatcgaacgtcgtcgcgctaaagccttttacctctggcggcgtcagcgtggttgcgggcgttctcaaccccagtaccttttgcgcaataagctgtcgatcaaccgtaagatatagcgcccgacgcactcgcacatcgttaaatggcggtttctcaaggttgaagttgtaatattcgctgttcagacgcggaataattcgtagctcgccaggcagacttttttcaatggcgggaatttgctgcgccggaacccaggtgagatcgacctctcccgcgcgatagcggttatagccggtgacgctattatctagcgccagatactcaacctgttgcaatactgtatgttgcgcatcgcggtactttggatttttgcgtgcagtaatcttttcgttaactacccactgatcaagcacaaaggcaccgttgtaaaccatgttctctggcttactccagctatcgccatgtttagcgatgacatgatgaggaaccgggaacagcgtcggccaggcgagcatcgtcgtgaaccaaggaaccggctgctcaagcgtaacttcaagagtacgatcatccgtcgctttgacacccaggcttgtaacatctgctttacccgcaacaatagctgcggcattgttaatgtgcgcctgtgccagatagccagcaaaagggcttgccgttttcgggtcaaccgcgcgctgccagccgaggacaaaatcctctgccgtcagaggctgaccgtcggaccactgcaaaccgctacgcagatggaaaatatagcgcttgccgccgtccagtatctcccagcgttcagcctgagcgggctgcacctggccttcaccgtccatccataccagaccttcaaacagatccagcacaatctgcgcggcagtattctcctccaccttttgcgggtcgagcgtacctgggtcgctatgattgttgtaacgaaagacttgttgcggggcgagcggtgtgttggcgggaacgtcagcagcgtagagaggagccgcacttaccaggctgaccagccataataaatttcgcgtatacatggtattccttaccggagaaattataagcccaacaacaatacgcctgtggcattgttcgctcaaacttatcgcgagtgatttggctcacactccggtaaagaaaaaagcgagttgcccccgcttttccattaattaacggatttcattcaatagttctggatgcttatccagaacacgtaaaagtttgattgtggaaggatgaggttgggcattgcctttttcgtaacggctaaacgcatttacacctcccccaaaaatttcgcttgcctctttttgggtaagagagagcttttttcgaaccttcactataaattcaggtgccactgtttcggcattcacgctagcccgaaatgcctttacttgcgccatgaaagcatcactctcttctttattcatgatgctctcttcgcaatggacacaatataaaccgtggatacctttcaatactgtttttcgtccacggaaggtgtatggaatatctttaatgccagaaaccatttctccctggtggcaaaccggacatttcatattacttctccttaaagctgacgatcagtacgtcatgaattaccgtaattttaagataaacctggcctgtaacaagcctgggtctgtaaacatcctgccagatagtatgatcagagtaggtggtcatgcttttataaaagtcgctctcacttaatccaatgataacattacacataccatcaaaatccaaacctaactcatctgcatttaacagggcactacgtgttgtacgaacttgcccggcattgacaagttttttaacctgactcaaacgtgtatgtggtgtgcgtttttccataacccccgcctccctgttactttagttataacctaaaaggttaattacagcaatgaaaaagcacctaaaaggttagttagatgtacggagatagtgaccacacaaaacgtattctttaaggaaagtgattgaccatataagaaagtggcgcattagtagcgccagtttgaagcaggaatttataagggaagctggagtcaggcatcacgccaacggcacataaacatccgtttccagtcgctgctctgtcaccccttcggcaagattggtgtagtgaaacagaatcggtgctttacgcattttctcgccgcttgcaggcagccagtggcgaatgatgccccataccgtgtgactaatatcgtccagctcgccaacgtggcgggccacggcataacgtccaccggtaagttcaccattgctcacaccataacgattatcgggaatcggttcgctaacgctgccgcagatatcaaagcgaaacgcttccggtgcggtggtggcagggtcgtcccaggcgacgccaaaagtctggctttggttaacaggagaaagccccgtctctttacgccacatgataaatttcgccacgctgtagttgagcaattcagggctacagcggtgcggcaacatcgccacaggtatacttgggaaatcgataatgtttacatccagtgtcaggtttgtcattttgcctccctgcgaaattattcccgggaacgcgtcccgggagcggtaacaattacggatttactttgcggatctgtttgacgtcaatttcaacagaattccagtctttatcgacttcaccctgaatctcaaccgtatctttcggcgtcaccgtcacgccgttccagcgtttgtggtcgatatcaacattgatagtaccgctggcatctttgaacacgtagagatcgtcagagatgcgttcaacgatattgccgcgcagggttacccaggtgtcgtcacgcagggattttgcgctttctacagtcgttacgctgccgttcggcccctggaatcctccggcctgactttgcgttgcgcttgggccagaaaaaccgccctgctctgctgccatcaccggtgcgctgcacagggccattactgcgattactgctgcgaattttttcatgtttattactccctttaatgtctgtttccgagcatttaacaagatagtccttaacaacttcttaagggaaaaaaataaaatttagtgctgtacagagcgcgttacaacacggtttactggcagcaaatacggttatcgcagggatgaaaaaatgcgaattttactgatagaagatgacatgctgattggcgacggcatcaaaacgggccttagtaaaatgggttttagcgtcgactggtttacacaaggtcgtcagggaaaagaggcgctttatagcgcaccttatgatgcggtgatcctggatttaaccttaccaggcatggatggtcgcgatattttgcgcgaatggcgagaaaaaggtcagcgtgagccggtactgatcctgaccgcgcgcgatgcgctggcggaacgtgtagaagggctgcgtctgggagctgacgattatctgtgtaaaccttttgcgttgatagaagtcgccgccaggctggaagctctgatgcgccgaaccaacggccaggccagcaacgagctgcgccacggtaacgtcatgctcgaccccggcaaacgtatcgccacgctggctggcgaacccttaacactgaaaccaaaagaatttgccctgctggaattactgatgcgtaacgctggtcgggtactgagccgcaaactgattgaagagaaactgtatacctgggacgaagaggtcaccagtaatgccgttgaagtgcatgtgcatcatctgcgacgcaaactcggtagtgattttattcgtaccgtgcatggtattggttacacattaggtgagaaatgaaatttacccaacgtcttagtctgcgcgtcaggctgacgctaatctttttaattctggccagcgtgacctggctgctttccagctttgtcgcctggaaacaaacaacggataacgtcgatgaattgttcgacacccaactgatgctgtttgccaagcggttaagtacgctcgatctcaacgaaatcaacgcggcggatcgcatggcacagacgccaaatagattaaaacacggtcatgttgatgacgatgcgctgacctttgccatctttacccacgacggcagaatggtccttaatgatggcgataacggagaagatattccctatagctatcaacgggaaggttttgctgacgggcaactggtcggtgaagacgatccttggcgttttgtctggatgaccagtcctgatggcaaatatcgcatcgttgttggccaggaatgggaataccgtgaagacatggcgctggcgattgttgccgggcaattgatcccgtggctggtcgcactgccgattatgttaatcatcatgatggtactactgggtcgtgaactcgcgccgctgaacaaactggcgctggcactacgtatgcgtgaccctgacagcgaaaaaccactaaacgcgactggcgtacccagcgaagtgcggccactggttgagagcctaaatcaactgttcgcccgcacacatgcgatgatggttcgtgaacgacgctttacctccgacgcagctcacgaacttcgtagcccgttaacggcgctgaaagtgcaaaccgaagttgcgcagctctctgacgatgatccgcaggcgcggaaaaaagcactgctccaattacattccgggatcgatcgcgctactcgtctggttgatcaactgctcacgctaagccggctggacagtctggataaccttcaggacgtcgcggagatcccgcttgaagatctcctgcaaagcagcgtgatggatatttaccacacggcgcagcaggcgaaaattgacgtgcgactgacactcaatgcccacagcatcaaacgcaccgggcaaccgctattgctaagtttgttggtgcgaaatttgctggataacgccgtgcgctacagtccacagggcagcgtggtagacgtcacgctgaatgctgataatttcatcgtgagggataacggccccggtgtgacaccagaggcactggcgcgaattggcgaacgcttctatcgcccacccggacaaaccgctaccggcagcgggcttgggctaagcattgtccagcgaatcgccaaattgcatggcatgaatgttgaatttgggaatgcggaacaaggtggatttgaggcgaaggtaagctggtaacttctctgtctatgagagccgttaaaacgactctcatagattttattaatagcaaaatataaaccgtccccaaaaaagccaccaaccacaaaccagacaaataccgaggctgaatacatatacccaaaactcgaacatttcccgcataaagagttttcttaagataagaataataagtggcgtaagaagaaaaaatgctgcaatcattgcttgcaatatacgatcttcgccactaacggaaggtatactgcaaatatttcctccgctctcaagcatccagtcatacttattgaaagcaaaaaaagaatctattaaccaataagtaagcattatatatagcaatgcttcaaatattgttttaattttctgctttaacatatatcagtacgctcataaaaatccatttataattatcaacatgacacgttgatactttcatcttttacttattcaaagccatattttcaatccccaaaaaaaccgaaccaaacgtgtaaattattccggtgcgagtaagaattatgaggaatggctatcagtattgtcattttcagaaaatatttatcctgcatcggtgagtcagagtaagatcagacttttgctaaattcgcaaaagactttgcacattttgctaatttcaccgtaccgctctgtgacgtactatagtcggcaaacgtctcaccttgaggttaaaaaatgagcaacatcctgattatcaacggcgcgaaaaaattcgcccactccaatggtcaactgaacgacaccctgaccgaagtcgcggatggcacactgcgcgaccttgggcatgatgtccgcatcgttcgcgccgacagcgactacgatgtcaaagcggaagtacaaaactttctctgggctgatgtggtgatctggcagatgccaggctggtggatgggcgcgccgtggacagtgaaaaaatacattgatgatgtattcaccgaaggtcacgggacgctgtatgccagcgatggtcgtacccgcaaagatccgagcaaaaaatacggttccggcggcctggtacagggcaaaaaatatatgctttctctgacctggaacgcaccaatggaagccttcaccgaaaaagatcagttcttccacggcgttggcgttgacggtgtgtatctgccgttccataaagcaaaccaattcctcggtatggaaccgctgccgacatttatcgctaatgacgtgataaaaatgcctgatgttccccgctatactgaagaatatcgcaagcatcttgtggaaatttttggttaactagagctcaggctttagaaggagttaaccatgcttaccgtaatcgcagaaatccgtactcgtcctggtcaacatcaccgtcaggcggtattggatcagtttgctaaaatcgttccaaccgtactgaaagaagaaggttgccacggctatgcgccaatggtggattgcgcagctggcgtgagtttccagtctatggcaccggattctatcgtgatgattgagcagtgggaaagcatcgcgcatcttgaagcgcatctgcaaaccccgcacatgaaggcgtatagcgaagccgtaaaaggtgacgtgctggagatgaatatccgtattctgcagccagggatttaatcctgccttgtttgcccggccatcctgaccgggcaatgttctttcctttaaacctcaatctccgccatgtcgcctttctcttgcaaccagttgcggcgatcttcgctgcgtttcttcgccagcagcatatccatcatcgcgtcagtacgctgatcgtcttcatcatcgatagtcaactgcaccagacgacgagtgttcggatcaagcgtggtttcgcgcaattgcatcgggttcatttcccccagacctttaaaacgctggacgttcggcttgcctttcttgcgttttaattgctcaagtacgccctctttctcttcttccgtcagcgcgtaataaacctctttcccgagatcaatacggtagagcggtggcagtgcgacgtaaacgtgaccgtgtttcaccaacgcgcggaaatgttttacgaacaaagcgcagagcagcgtggcaatgtgcagaccatcagagtccgcatccgcgaggatacagattttgccataacgaagctggctcagatcgtcgctgtcaggatcgataccgatcgctacgctaatatcgtgcacttcctggctagccagcacttcgtcggaagagacttcccaggtgttaaggatcttacctttcagtggcatgatcgcctgatattcgcgatcgcgcgcctgcttggcagatccgcctgcggagtcaccttccacaaggaacagctcggtacggttaaggtcctgcgcggtacaatcagccagtttgccaggcaacgccgggccgctggtcagctttttacgcaccacttttttggccgcacgcatacggcgctgggcgctggaaatcgccatctccgccagcagttcagccgcctgaacgttctggttcagccacaggataaaggcatctttcaccacgccagaaacgaatgccgcgcattgacggctagagagacgctctttcgtctgcccggcaaactgcggatcctgcatttttacactcagcacataggcgcagcgatcccagatatcttccgcgctcagctttacaccgcgcggcagaatattgcggtattcacagaactcacgcatcgcgtccaacaggccctgacgcagaccattaacatgggtaccgccctgcatcgttgggataaggttgacgtagctttcggtcagcagttcaccgccttccggcagccacagtagcgcccagtccacagcttcagtatcaccagcgaaattaccgataaacggtttttccggcagcgtcggcagaccatttaccgcttccgccaggtaatcattcagaccgtcctgatagcaccagcgttgttcggtattgttgatctcatctttaaaagtgatctcaacgccagggcacaataccgctttggctttcagcacatgcgtcaggcgactaacagaaaatcgcgggctgtcaaagaaggtttcatccggccagaagtgcacactggtaccagtattgcgtttaccgcaagtgccgacaacctgtaaatcctgcaccttttcgccattttcaaaggcgatgttataaacctgaccatcgcggcgcacgttaacttctacgcgcttgctcagggcgttaaccacgctaatccccacgccatgcaggccgccagagaactggtaatttttgttagagaatttaccgcctgcatgcagacggcaaagaatcagttcaaccgccggtacaccctcttccgggtgaatatccaccggcatcccgcgcccatcgtcaataacttctaagctctggtcagcatgtaaaataacgtccacgcgttttgcgtgacccgccagtgcttcatccacactgttatcaatgacttcttgccccaaatggttagggcgagtggtatcggtatacatccccggacggcggcgaaccggctcaagcccggtgagtacctcaatggcatcagcgttataagtttgcgtcatggtttaagttagtaattcgagttgatcgtcagagatggtgcagaccaagaaaatcgacgatcgggttgaaataatcttcgaagcccgtgaatgcgtggttgccgccttctatgacagtctggcggcaggaagcgtagtacgccaccgcctggcggtaatccagcacttcatctcccgtctgttgcagcagccagatcaaatccggcgcttccagcgggtcaatctgcatgactttaagatcgtaaatatggcgactctctagcacatattgctgcccggtgtaggggttctcgttctgaccgagatagtccgtcagcagttcaaacgggcgcaccgccgggtttaccaccactgcgggcagcataaaacattgactcaaccaggtggcgtaatatccccccagactgctaccgacaatacccaggctatcaccgccatgttccaggacaatggattccagcagctctgccgcgtcggaaggatacggcggcaactgcggaatgatcatctcaacgtcagggtgatgttccgccagccagttttttaacaagctcgcttttgcagagcgcgggctgctgttgaaaccgtgtaaataaagaagcgtagacatcagtagccttcactagcggtatcaggttggaaacgtgtgtccgccaggcgatgcacctcggtggtcagcgtgccatcagcatgtaactcgagagtacgccagccgggcgcgatggtatccagcgtaaagttggaacagtgcggcttaaactgcacacaggtgctcggcgttgccagcaggcggcgaccattccagtcgagatccagctcctgatgaatatgaccgcacagcaagtatttgacgtgcggaaacttcgccagcacggtatccagttcgcccgcgttacgcagactgtgttgatcgagccaactacaacccgcaggtagcggatgatgatgcagcagcagcaacgtatggcgttctggcgcatcggccagtttacgttccagccactcaagctgaaactcgctcagctcaccgtgcggcacgccaaacacctggctatccagcaacaggatttgccattgctcaccaataaacacgcgcttcgccggggagatacccgcatcctgtaacgcgctgtacatcgcgggctggaaatcgtggttgcccggcagccagacgcagggcgcacgaaaacttgcgatgccttcagcgaaatgctgataggccgcagaggattgatcctgcgctaaatcacctgtcgcgacaatcaggtcgaattcgtgctggtgtggccgaatcgcctccagcaccgcctggtaactctcccaggtgtttacccctaacagggcttcgtgcttttgtgcaaacaggtgagtgtcggtaatttgtaaaatcctgactctggcctcaccagccagaggaagggttaacaggctttccaaatggtgtccttaggtttcacgacgttaataaaccggaatcgccatcgctccatgtgctaaacagtatcgcaaccagtccgctaaaaactgattaatttgatgcttttcgtcgcgttgatgcaactttttattaggataatcataccgcgctttgaagcgaaaaatctgctggctactacacacttcagccaccatcgcgtcatgatacagacgcaccgtcatactcggaaggctccagtaactgatcgcgggcgcagtctgttctattgtcaccagggtagtgtatcgggtgctttccacaatcgtcagccgatattgtgcgtttgccacctgatagcttacagtttcgccgggtgcgtcattgcgcggtaacaaacggcgcaattgactaaagttcatctcgcacaggcgcatcatttcaggaaagtcaggtgtgtaacgcttcatttatgcccactcattttttaacgcttgatgatgcagctgcagccattgcaaagcgatgacgctcgctgcgttgtcgattttcccctcttctacccactggtatgcctgttcccggcttaccacatgaacgcgaatatcttcgttttcatcagccagaccgtgaataccgcttgcggtcgtggcgtccacttcgcccaccataatactgctacgctcactggtgccccccgggcttgccaggaaacttaacaccggtttggtccgtttgactatcagtcccgcctcttcaatcgcttcgcgacgggcaacatcttccacactttcaccctcttcaatcatcccggcaaccatctccagtagccaaggggtttcgctggtgtcgtacgcggcaatccgaatctgctcaatcagcacaacttcatcacgcactgggtcaaagggtagcaagactgcggcgtgaccgcgctcaaaaatttcccgccgcacctcatgactcatttgcccgttgaatagacgatgacgaaatctataaagatctaaactaaaaaagccgcgataaagtgtttctcgtgcaataatttctacatcgtttttgccaaatgtaacgggcaggttgtctggcttaagcattgttaatgtcctggcactaatagtgaattaaatgtgaatttcagcgacgtttgactgccgtttgagcagtcatgtgttaaattgaggcacattaacgccctatggcacgtaacgccaaccttttgcggtagcggcttctgctagaatccgcaataattttacagtttgatcgcgctaaatactgcttcaccacaaggaatgcaaatgaagaaattgctccccattcttatcggcctgagcctttctgggttcagtagcttgagccaggccgagaacctgatgcaagtttatcagcaagcacgccttagtaacccggaattgcgtaagtctgccgccgatcgtgatgctgcctttgaaaaaattaatgaagcgcgcagtccattactgccacagctaggtttaggtgcagattacacctatagcaacggctaccgcgacgcgaacggcatcaactctaacgcgaccagtgcgtccttgcagttaactcaatccatttttgatatgagcaaatggcgtgcgttaacgctgcaggaaaaagcagcagggattcaggacgtcacgtatcagaccgatcagcaaaccttgatcctcaacaccgcgaccgcttatttcaacgtgttgaatgctattgacgttctttcctatacacaggcacaaaaagaagcgatctaccgtcaattagatcaaaccacccaacgttttaacgtgggcctggtagcgatcaccgacgtgcagaacgcccgcgcacagtacgataccgtgctggcgaacgaagtgaccgcacgtaataaccttgataacgcggtagagcagctgcgccagatcaccggtaactactatccggaactggctgcgctgaatgtcgaaaactttaaaaccgacaaaccacagccggttaacgcgctgctgaaagaagccgaaaaacgcaacctgagcctgttacaggcacgcttgagccaggacctggcgcgcgagcaaattcgccaggcgcaggatggtcacttaccgactctggatttaacggcttctaccgggatttctgacacctcttatagcggtagcaaaacccgtggtgccgctggtacccagtatgacgatagcaatatgggccagaacaaagttggcctgagcttcagcctgccgatttatcagggcggaatggttaacagccaggtgaaacaggcacagtacaactttgtcggtgccagcgagcaactggaaagtgcccatcgtagcgtcgtgcagaccgtgcgttcctccttcaacaacattaatgcatctatcagtagcattaacgcctacaaacaagccgtagtttccgctcaaagcagtttagacgcgatggaagcgggctacagcgtcggtacgcgtaccattgttgatgtgttggatgcgaccaccacgttgtacaacgccaagcaagagctggcgaatgcgcgttataactacctgattaatcagctgaatattaagagtgctctgggtacgttgaacgagcaggatctgctggcactgaacaatgcgctgagcaaaccggtttccactaatccggaaaacgttgcaccgcaaacgccggaacagaatgctattgctgatggttatgcgcctgatagcccggcaccagtcgttcagcaaacatccgcacgcactaccaccagtaacggtcataaccctttccgtaactgatgacgacgacggggcttcggccccgtctgaacgtaaggcaacgtaaagatacgggttatctgccgcattcttcccccttcagccttcaatttcgaccagccatcctctattctgatgggtatttaccactggtcccggaagacaaaaatgaaacggacaaaatccatacgccacgcatcgttccgcaaaaactggagcgcacgccatctgacaccagtcgctctcgcggttgccactgtttttatgctggctggctgtgaaaagagtgatgaaacagtgtctctctatcaaaatgctgacgactgtagtgctgcaaacccaggcaaaagcgccgaatgtaccaccgcgtacaacaatgcgctgaaagaagccgaacgtactgcgccgaaatacgccacccgtgaagactgtgttgctgaatttggtgaaggtcagtgccagcaggcaccagcccaggctggcatggcaccagaaaaccaggcgcaggcccagcaatccagcgggagtttctggatgccgctgatggccggttacatgatggggcgtctgatgggcggcggcgcgggatttgcacagcagccgctgttctccagcaaaaacccagccagtccggcttacggtaaatataccgacgcgacgggtaaaaactatggcgcagcccagccaggccgcaccatgaccgtaccgaagacggcaatggcaccaaaaccggcgaccaccactaccgttacccgtggcggttttggtgaatctgttgccaaacaaagcactatgcagcgtagtgcaaccggtacctcttctcgtagtatgggtggctgataccgatggaaagagtcagtattaccgagcgcccggactggcgtgagaaagcccacgaatacggtttcaattttcacaccatgtacggcgagccgtactggtgtgaagatgcttactacaagttgaccctcgcccaggttgaaaagctggaagaagtcaccgccgaactgcaccagatgtgcctgaaagtggtggaaaaagtgatcgccagcgatgagctgatgaccaaattccgcattccaaaacacacctggagttttgtgcgccagagttggctgacgcaccagccaagcctttatagccgtcttgatctggcgtgggatggcactggtgaacctaaacttctggaaaataacgccgatacgccaacgagtctatacgaggcggcgttctttcagtggatctggctggaagatcagcttaacgccggtaacttgccggagggcagcgaccagtttaacagtctgcaagaaaaactgatcgatcgcttcgttgagctgcgtgaacagtatggcttccagttgctgcatctcacctgctgtcgcgacacggtggaagatcgcggaaccattcagtatttgcaggactgcgcaacggaagctgaaattgctactgagttcctctacatcgatgatatcgggttaggtgaaaaaggtcagttcacggatttacaggatcaggtaatttccaacctgttcaaactgtatccgtgggaatttatgttgcgtgagatgttcagtaccaagctggaggatgcaggcgtacgctggctggaaccggcgtggaagagcattatctccaacaaggcacttctaccgctactgtgggagatgttcccgaatcacccgaacctgctgcccgcttattttgcggaagatgatcatccgcaaatggaaaaatatgtggttaaaccgatcttctcccgtgaaggcgcaaacgtgagcatcattgagaacggcaaaaccattgaagcagcggaaggtccgtatggcgaagaagggatgattgttcagcaattccacccgttaccgaaattcggcgacagctatatgctgattggtagctggctggtgaacgatcaacccgccggaattggcattcgtgaagaccgtgcattgatcacccaggatatgtctcggttttatccacatatttttgttgaataagccacgataccggatggcactcgccatccggtaattgttagcctatctgcacgctcagcatactcaggctgcccatttctataccctcaaccggaatggtaattggctcctgcccatcccacgcacctaacacatacaacaacggcaaataatgctctggcgttgggttgcttaacgtgccaccttcatggtcgaggtaattcaccagaggatgttgttccactggcccttgccacgtcagattcgctttcacatactcattaaagctcgtcgcccacggatacggactactatcaccgtgccacttcactgtgcgcaggttatgcaccacgttaccgctggcgaccaacattattccttcatctcgcagcgctgccagtttgcgccccatttcgaaatgccaggcggcaggtttgctactgtcgatactcaactgcaccatcgggatatcagcgtcaggatacatcttaatcagcacgccccagctgccgtggtcaaagccccaggcttctttatccagcgtcaccgggatcggcgctaacagctcaaccagacgctgtgccagcgcagggctacccggagcaggataatgcgtatcgtacagcgcctgcgggaagccaccaaagtcatgaatcgtgggcggcgtctccatcgcggtcactcctgttccacgggtaaaccagtgagcgctaaccaccacaatcgcttgcgggcgtggcaatgtcatccccaacttctgccagctgcgggtatacaaattatcttccagcacgttcatcggactaccgtgacctaaaaacaatgctggcatacgtgtactagacatgatgatatccttaactaaaggtgtcattttgatatcctcacaatacgcttgttcggcggagtaagaacccggataacaatgatgatgatcatcagttattttgacgatctgcctgaaggtgaagatttataaggagttgtcgatgagtgtacctctcattctgaccatactggcgggggcagccacgtttattggcgcgtttctcggcgttctcgggcaaaaacccagcaaccgcttactggcgtttagcctaggttttgcggcggggatcatgttgctcatcagtttaatggaaatgcttcctgccgcactagcagctgaaggaatgagccctgtgttgggttatggaatgtttatcttcggtctgcttggctattttggcctggaccgcatgttgccacatgctcatccgcaggatttaatgcaaaaaagcgtgcagccgttgccaaaaagcatcaagcgcacagccattctgctcactctcggcatcagtctgcataacttcccggaagggattgccacctttgtcacggcgagcagcaacctggagctgggatttggcatcgcactggccgtcgcgttgcacaatatccctgaaggtctggcagtggcaggcccggtttatgcggcaacggggtctaaacgcaccgcgattctgtgggcggggatttctggactagcagaaattcttggtggtgtgctggcgtggttaatcctcggtagcatgatttccccggtggtcatggcggcaatcatggcggcggttgcaggaattatggtggcgctcagcgttgatgaattaatgccgctcgccaaagagattgaccctaataataaccccagctatggcgtactatgtggaatgagtgtgatgggattcagtttagtgctgctacaaacggcgggaattggttaaaaacaacatcagaagttgtccagcgcatggacaacttctgccagcttcacgaaagccttattctaccttttcggctgtctcttctctcgtactgtttaagtatttgttccgcgcttcaagcagtgcgtctctgtcctggcgaaacgcccgacaataacgtttcaaatgcaggaaataacccaccacaaccagagcaatcaatacaatccagtaccaggcgataaacatccttttacccttaatatttaacaatactaaacatttagcgtataaatttcacatatcctttttcggatatattcatatggtcgcataataacggaacaattatatgattttgatcataatgaaaaagaatgcctgatattaatgaaattttctcatagaaagagaagcggaattaacatcttgcatagcagggaaaaataaaaaccgaagcctgctacaacttcggtttcttgattaaggcagtaaattaagcagcggttttcagctggctttacgctcatgtgcctgacggtatgccaccaggtcttcaatagtcacgagcgccatattgtgtttattggcaaactcaatacactctggtgcacgcgccatcgtgccatcgtcattagtcagctcacacagtacaccagccggtttaaagcctgccagcgtcatcagatcaatagttgcttcagtatgaccgccacgcgtcagtacaccacctgcctgagcgcgaagtgggaaaacgtggccaggacgattcagatcactcggttttgcgccatcggcaatcgctgcgcgaacggtcgtaatacggtcagcggcagaaacaccggtagtcacaccttcagctgcttcaatggtcacggtaaaaccggtgccataggcgctggtgttattttctaccatcattggcagatcgagttgtttacggcgatcttcagtaatgcacaggcaaacaataccgctaccgtggcgaatggtcagcgccatctgctcaacagtcatggtttctgccgggaagatcatatcaccttcgttttcacggtcttcatcatcaagcaccattacaccgcgtccttcacgcagcgcagccagtgcattttcaacacgttcgaaaggcgtaccaaaagaggaaagtagcgtctgattcatggtaaaaaaacctcactaaaattatggttaccagaatcagggcagtcttaggagtggcggcatatagccaaaataacgtgagcgggtccatgcccgacagaatcgttactctctcccatccggactctaaccgtcggccccggaattacaccggatctgctgtcctttgagttcgcacccaaagcgctcgcgggctttcaactgagttgatttaccgccggtggggaatttcgccccgccctgagaataagcggattcactataacgctaatgattagcggcagcaacgcatagcttcacataattctggtttatatctaatacaaacactaaaacgggccatcaggcccgttatatcagtgctctaactccagctctcttgcctgcatcatctgttgacaataccaggcataacgtgcgcaaaaccaggttctatgttcttcatccatgttaccagtaacggccagaatatcgaccgggcgaccttctgcgtgcattctggcaaaactacgcgccaggaaatcgaaattatttaaagaattaagactatgatccataagcacatcctccggttatcgcataccttttaaggccatatgctttttctgatttcagtattccccaatcagtgtagtgcctttaaacataacgtgcgtaaatatattgtccccgatcacactttttagtgaaaaataaaaaaccatattaaaagactttctcttccagaacttctctaacctgtgttattattaacacagataaatgtaagcaaggaaactattacaaagtaaatattgcgtcactaaatggacattggagtgatatatgattttattcgccgactataacaccccttatcttttcgctatttcctttgtactgttgatcggcctgttagaaatttttgcgcttatctgcggtcacatgctctccggtgctcttgatgcacatcttgaccattatgattctataaccacaggtcatattagccaggcacttcattatctcaatattggaagattgccagctctcgtcgttctctgcttactggctggtttttttggtcttattggcatcctgttgcagcatgcctgcatcatggtctggcaaagtccactgagcaacctgttcgtggttcctgtcagtttactgtttacgattattgcggtgcattataccggtaaaatagttgcgccctggattccacgcgaccatagtagtgctattacagaagaagaatatattggtagcatggcgttaattaccggtcatcaagccactagtggtaatccctgcgaaggaaaactcaccgatcaatttggccaaatacattatttactactggagcctgaagaaggaaaaattttcactaaaggagacaaagtgttaattatttgccgactttctgcaacgcgatatttggcggaaaataatccctggccccaaatattgtaatttattaatcaaaaggaaatttaataatggatgatattgttaattctgtgccctcctggatgtttaccgcaattattgccgtatgcattctgtttattattggaattattttcgccaggctctatcgtcgcgctagcgcagagcaagcttttgttcgtactggtttaggtgggcaaaaagtggtaatgagcggtggcgcaatcgtgatgccgatctttcatgaaataatccccatcaatatgaatactctgaagctggaagtcagccgcagtaccattgatagcctgattacgaaagatcgtatgcgcgtcgatgtagtagtcgctttctttgtgcgggtaaaacctagtgtagaagggattgccaccgctgcccagacgctggggcaacgcaccctgagccctgaagacttacgtatgttggttgaagataaatttgtcgatgccctccgtgcaacagctgcgcaaatgaccatgcatgagttacaggatacccgcgagaactttgtgcagggggtgcaaaatacagtggcagaagacctgagcaaaaacggtctggaactggagagcgttagtcttaccaactttaaccagaccagcaaagaacatttcaatccgaacaatgcctttgacgccgaaggtttaaccaaactgactcaggaaacagagcgccgtcgccgcgaacgtaacgaagttgaacaggatgtagaagttgcggtgcgtgaaaaaaatcgcgatgcgctaagccgcaagctggagattgaacagcaagaagcgtttatgacgcttgagcaggagcagcaggttaaaacccgtactgccgaacagaatgcacgtattgcggcttttgaagctgaacgtcgtcgtgaagcagagcagacacgaattctggctgaacgacagattcaggaaacagaaatcgaccgcgaacaggccgtccgcagtagaaaggttgaagctgaacgtgaagttcgcattaaagagatcgaacagcagcaggtcaccgaaatcgctaaccagacgaaaagcatcgctattgccgccaaaagcgaacaacagtcccaggcagaagcgcgtgctaatctcgcacttgcagaagcggtaagcgcccaacaaaacgtagaaaccactcgccagactgccgaagccgatcgtgctaaacaagttgccctaatcgctgccgcgcaggatgcagaaaccaaagcggttgaactgaccgtgcgggcgaaagcagaaaaagaagccgcagagatgcaggcggcggctatcgttgagttagccgaagctacacgtaaaaagggtctggcggaagcagaagcacaacgtgcgctgaacgatgctatcaacgtactttctgatgaacaaaccagccttaaattcaaactggccttgttgcaggcgctgcctgcggtaatagagaaatccgttgagccgatgaagagtatcgacggtatcaagattattcaggtcgatggtctgaatcgtggcggcgctgcgggtgatgcaaacacgggtaatgtggggggcggaaacctggcggaacaagcattaagtgccgctctctcttaccgcacacaggcaccgctgattgactccttgctcaatgaaattggcgttagtggcggcagtctggcggcattgactagtcccttaaccagtacaactcccgtcgaagaaaaagcagagtaaaccctcttccaggaataatccctggcccaaaaagccggggattttttatatctgcgttccgctaaaaagtgcaaatgatcaggttgttgcagcattttgcgtgacggctcggggaaggcaaaactgcatcagagaaagcattgcgtggggtctggcgctcatcaacaatcggggagtcagcagggggctgaaacgggaaagcccctcccgaagaagggggccttacagaaggaaagggttatgatgaagctcgtcatcatactgattgtgttgttactcgtaagtttcgcagcttattaacagccaatcagaggggggagaaatcctccctcacccttgttcctttactttaggttgaaaaaaaatcagcgtcaagaaggtttcattaacacatatccctggcccaaaaagccggggattttttatatctgcgttccgctaaaaggtgcaaatgctcaggacgttgcagcgttttgcgtgaccgctcggggaaggcaaaattgcctctgggaaagcattgcgcggggtccggcgctcatcaacaatcggggggcagcaaggggctgaaacgggaaagcccctcccgaagaaggggccttgtataaggaaagggttatgatgaagctcgtcatcatactggttgtgttgttactgttaagtttcccgacttactaacaactcatcagaggggggagaaatcctcccttacccttgttcctttactctaggttgaaaaaacaacagcgtcaataggcctgccatgtacgaagcgagatctgtgaaccgctttccggttagccttttttatcctgttggatcttcttgatgatgttggtcgtgctgcaaccgtcttcaaagttgagcaccaacacttcgccaccgttggcccagacttctttactcccggcaatctcttctggtttatagtcgccgcctttcaccagcagatctggcaagatcccggcgatcaagcgctgcggcgtgtcctcttcaaagctcactacccagtcgaccgcttccagtgcgcccagcacaatcatacgctgttcgagtgggtttaccgggcgggaatcccctttcagccgtttggtggaggcatcgctgttgacggcaacaatcaagcggtcacccagcttgcgggcatttgccagataagagacgtgcccggcgtgcaggatgtcaaagacaccgttggtcatcaccactttttcaccacgtttacgcgctgccgctacggccagcttcagttcctcttcggtcatcacgccaaagcctgtatctgcacgtccacgtacagcattttccagctcgatcgggctaaccgtggaggttcccagtttgccgaccaccacgccagccgccgcattggcaaagaagcaggcttcttccaggctattacccgctgccagcgttgccgccaggacgccaatcaccgtgtcgcccgcaccggtaacgtcatacacttcctgcgcttgggttggcatatgcagcggcgctttacccggttgcagcaggctcataccctgttcggaacgggtcactaacagagcgctgagttcgtaatcggcaatcagtttcatgccgcgctcaacaatctcttcttcggtcttacatttaccgacaacagcttcaaattcgctgagattcggcgttaacagcgtagcgccgcggtagcgctcaaaatcggtaccttttggatcaatcagcaccggaacacccgctttacgcgccagttggatcatctgctgtacgcttgccagcgcacctttggcgtagtcagaaagcaccagcgcgccaatgctactcagcgcctgattaatccgctcgtgcagcggctgcggatcaacaccttcgaaaccttcttcaaaatccagacggatcagctgttggttgcgggaaagtacccgtaatttggtaatggtcggatgcgtcggtacagaaacgaagtcgcatttgacgttgacgtcggccagagatttactcagcgcgcgcgctgcatcgtcaatgcccgtcaacccgaccaggcgtgcattagcaccgagagaagcgatattcatcgccacgttagccgcgccgcccggacgttcttcgatggtattcactttaaccacgggcaccggcgcttccgggctgatacgactggtggggccgtaccagtaacgatccagcatcacatcaccaaccaccatcactcctgcacgttcaaactctggcagcgttactttcattcctgtctcctgagagattcaaaatttgcgcgcgataataccatacttcattcttccaccagccacttctgccagcttgcccgcaccagttcacgctctgcggtgaagcaatcctcgctcacatggcccggcaattcctgtaatgccagatgatgaagttcatcgcgaagcgtagtgtaagcacgggtcagcgccatcgcttcctgctcttccataatgtcgttttgcgccagtagttccagaatacgcacgttgtcactccagcgcgttaacttcggtttttcatgagcgtagcgcaacaccagatattgggtaataaattcgatatcggtaattcccccttcatcagctttgatatcaaagcgatcgcgatgtttattgccgagatgagcgcgcattttctcgcgcatttcccgcacttccgtttgcagagttttaccttcacgcggcagcgtcataatctcgcgacgcactgcgtcaaagtgcgcggtgagctgcggatcgccgtacactacacgcgcacgcaccagcgcctgatgttcccacgtccaggcctcgtttttctgataatcggcaaatgcttctgcggatgtcaccagcattcccgccgccccggacggacgcagtcgagcatccacttcatacaaaatgccggaagaggtacgcgtactgaacagatgcataatgcgttgcgccagacgcagataaaactgccgcccgtcgatttcccgctcaccgtcagtcatcgcatccattgggcaatcatggaggaagataaggtcaagatcggaactgtagcctaactcccagccgcccagcttgccgtagccgaccaccgcaaaaccacgcccttcgcgttcgttcaggtgattcggcttaccgtagcgggcaaccatttgaacccacgcctgctgaacgacggcatctatcatggcttccgccagccaggttaagtgatcgctcactttcatcaccggtagcgtaccggcgatatccgctgcggcgatgcgtaacagctgcgcctgtttgaactgacgcagcgcctcaagctgttgctcttcgtcatcttccggcacgcgcagcaaatactggcgcaactcatcgcggtaggcatcggtcgccgtcggctggtaaagggtgtttggatcgagcaattcatccagcaataatggataacgcgccagctggctggcaatcatcgggctcgcggcacacagagaaatcaaatgtttaagcgccgcggggaattcactgagcaattctaaataggtggtgcgggtaacaatccccaccagcaaggcggtaatgcggctcagcgtaacggcagcgtcttcacgcgcacagacatcacttagcagatgcggcatcagatggtcgagcacctgacgtcctcgcggcccgatggtgcgcttatccagctctttgcggaaatcggcaatcagcgttagcacctgtttgcgatcatcctcgctaagatgcgccagcactggcgtagtgtcatcttcctgcaacgcatcctgccacagctcacgccactgttcgctcaggctctcttcctgagtttcactttcatcgtcgccaatcaattcattaaacacccggcgcacattggtcatatgtgcggtcagcgccccggtcagttgcggccagtcagcaaagtccatcgcccacgccagccgcgcacgattaagctcatcagaaggaagcgtctgggtttgttcgtcgttaatgctttgcagcaggttttccagacgccgcaggaacagatacgccactcgcaattgttcagcatcgttttcagaaagcagatgcagctcggcaatggcgctgagcgttggcagtaaagagcggctttgcaggctcggttcgcgtccgccgcgaatgagctggaacacctgaacgataaattcaatttcgcgaatgccgcctgcgccgagtttgatattgtcggtcaaaccacgtcgacgcacttcacgggcaatcatccctttcatgttgcgcaggctctgaatcacgctgaaatcgatgtaacgacggaaaacaaacgggcgcagcatcgcacgcaactcgttagcatagacgccttcgctatcgcccataatccgcgccttgaccatcgcgtaacgctcccagtcgcgcccctgctcctggtaataatcttccaacgcggcaaagctcagcaccagcgggccactttcgccaaacggacgcagccgcatatccacgcgatagacgaagccatcctgcgttggttgatccagcactttaatcagccgctgccccatgcgggtaaaaaactgcgcgttatccagttcccggcgtccaccctgcgtacaaccatgttccggccaggcaaaaatcagatcgatatcagaggagaaattcagctccccaccgcccagcttacccatgcctaaaatcagcagcggttgcgcttcgccctgcgcattgcacggcgttccccactcgcggcagcaggcgtcatacagccagtcacgcgccgcaacaatcagcgtctccgccagatagctgagctgctgcaatatgctctcttcagtaaccagtgccagcgtttgcgcccaggcgatgcgcaccataatgcgccgccggaatagccgcagctcgcgcattaacccggcttcgtcactcacattacagagcgcctcctgcaaccatgccgcgtaatgctgccattcgtcggcctgcggcggttggctttccagttccgtcagccactctggatgcgcaatcacgctgtcctgcacaaaatcactaaaagtaagtacactcttcgcctgtgcgctaagactttcctcggctaaaggctctggcagccgctcaacaacggtctgccagtactgctgtaacggactagagagcggcttcataagcgattttatccttgcctgattaacgttttccgctgtgcaaccagaacggttcctgattgtttgcctcattacggaaatgttcaatttcgatgcgttgcccggtcgcaatagcgtgatgcagcccctgccagttctccagccaggcttgcgcgacgacaggatcatagtaacccgccagcaacagtatactgtcaatatcacgcgtcaggcgtggcaactggtcacggtagcgatcgcctaacggctggcagaaaacgcttttcagttcagcggcatggcgggaaagatggatatcggcaaagcgtttgaaggagtcgctgattttgccctgcgctttggcatctaaaaatggctgccatgctttgcttaccaaccattcggtcaacgccagcttcgccattgccgtttcggtagagtagaccgccgtcacggcagacaccgcagaagcaatggtcgcctcgcattgagtcagcagatcacgtaagtgagtgctcgctttacgcggcacaataccaccgaacagcatcagcgtatgacggaccaggctaatggctgccagcacctgttctttcgccgcatcgttgccgcgtacccacagttcttcatgatactgccattgcgctaacgccagctcgagcgccgcttccagcccctgttccacatcggcttttgccgcaacatgcaaaatggtggtcggtttgatttcacgcgccggattgccctgcgccagatgatagccacgcgccgctttgctcaggctgccctggcgtaatccggtttggcttaccagttggttcgccagtttcagcaccgcgcgcgtgtcgccgctaagcagttccagttccagctcacagataggttcagcaaattcacccgctttcacttccccctggtcgagggcgatttcaatttggctaccatcgaccgccaccagccatttttcgcgataaaaatcggtgctgaacagcggctgcacgcgggaggcgagatcggcgggcaattcgccgttcggccagacttccgtcggtaactgcgccaggtcgagcgtcggttcgctcaacgccacgttatattccgggcgctgatgtaagccgcctgtcactcttcctgcaactttcatggtcatctcatagcgaccgttttcgccacgaatacgtaagcccatatcgtgcccacgcagccagttatccggcgtttcgtagtaaatattcagcaactgcacggggtcatggtgctcgccgcccagcgtattgagatggtcacgcaacgcctcaacggcactgtgattaacaataaactttaattcgatttcctgagccatggcctttacttatcggttatgtcacataagtgacgatgaacggcgaacttaatgcgatcttttttgtcagtagatagtattttgcgccaaattgccatgcaacgggcaatttgacgggcgtaaaagtttgaagcagtggcaagacctgacacagaggattccgattgatgtcgaatgctttgcgtagcgacactgatgccactactatcgttccactttccatgacaataacgacagcctgatgccaaaattacgcctgatcggattaactttactcgcacttagcgcgactgccgtcagtcacgctgaagaaacgcgctatgtttccgacgaactgaatacctgggtccgcagcggtccgggagatcattatcgcctcgtgggcacggttaacgccggcgaggaagtgaccttattacaaactgacgccaacaccaattatgcccaggtgaaagacagctctggccgtaccgcctggatcccgttgaaacaacttagcactgagccaagcctgcgctcccgtgtgccagatctggaaaatcaggtcaaaaccctgaccgataaactcaccaatatcgataacacctggaatcagcgcaccgcagaaatgcagcaaaaagtggcgcagagcgacagcgtgatcaacgggttaaaagaagaaaatcagaaactgaaaaacgagctgattgtcgcgcagaaaaaggtcgatgccgccagcgtacagctggatgacaaacagcgcaccatcatcatgcaatggtttatgtatggcggtggcgtgctggggcttggcttgctgctcggtctggtactgccgcacctgatcccaagccgcaaacgcaaagatcgctggatgaactaaatcgccttcttcgttgcactgtcttattattaggaattgtgtatttgacgaagggatgatggcgtgaagatttatctggtcggtggtgctgttcgggatgcattgttagggctaccggtcaaagacagagattgggtggtggtcggcagtacgccacaggagatgctcgacgcgggctaccagcaggtaggccgcgattttcctgtgtttctgcatccgcaaacgcatgaagagtatgcgctggcacgtaccgaacggaaatccggttccggttacaccggttttacttgctatgccgcaccggatgtcacgctggaagatgatcttaagcgtcgcgatctgaccattaatgcgctggcccaggacgataacggcgagattatcgacccgtacaacggtctgggcgatctgcaaaatcgtctgttgcgccatgtttcccccgcttttggcgaagatccgttacgcgtattgcgcgtggcgcgttttgctgcgcgttatgcccacctcggttttcgtattgccgatgaaactctggcgttgatgcgcgagatgacccatgcgggtgaactggaacacctgacgcctgaacgggtatggaaagagacggaaagcgccctcaccacccgcaatccacaggtgttcttccaggtactgcgcgattgcggcgcactgcgcgttttattcccggaaattgacgcactgtttggcgttccggcccctgccaagtggcatccggaaatcgatacgggtattcataccttaatgacgctcagtatggcggcgatgctgagtccgcaggtcgatgtccgtttcgcaactttatgccacgatctcggtaaagggctgacgccgccagaactctggccgcgtcatcatggtcatggcccggcgggtgttaagttagtggaacaactatgccagcgtctgcgcgtgccaaatgaaattcgcgatttagccagactggtggctgagtttcacgatctcatccacaccttcccaatgctgaacccaaaaaccatcgtcaaattatttgattccatcgatgcctggcgtaaaccgcagcgtgtcgagcaactggcgctgaccagcgaggctgacgtgcgcggcagaaccggttttgaaagtgcggactacccgcaaggccgctggttgcgcgaagcctgggaagtggcgcagagtgtgccgacaaaagccgtcgttgaagcgggatttaaaggtgtggagattcgcgaggagctgacccgacggcggattgcggcggtagccagctggaaggaacaacgttgcccaaagcctgaatgagtattgggcattttgccggatgcggcgtaaacgccttatccggctacatgtcaacgacagttgtaggcctgataagacgcgcaagcgtcgcatcaggcgttgattgccggatgcggcgtgaacgccttattcggcctacgcaatcgttgacaacgccaagcatccgacactattcctcaattaaaagaacacgacatacaccgcagccgccacaataaagcgataaatggcgaacgggataaagctaatgcgcttaatcaattgcaggaaggttttaatcgctatcagcgccaccacaaaagcggtgataaacccaacggcaaacatcgggatatcgccgcttgtcaggaagccccagcttttgtagagatcgagcgccgttgcgcccatcatcatcggcaccgccagcaggaagctaaactcggaagcagcgtaacggctcacccccatcagcatcccaccactaatggtcgccccggaacgggagaaacccggccacagcgccagacactggaaacagccaatcataaatgcctgacgataggtcatatcatcaagacccggcgcacgcggctctttcggcttcaggcattcggcggcaatcagcaacaaaccgccaacgaccagcgcatacatcacatttatcgggttaaacaaactcttaatcgtgtcgtggaacaacagccccaataccaccgccggaatcatccccagcaaaatgtggatcagcgttaaacgacctttgctttcaccttcgtgctgcaacgggcggccaaagtggatgccaatcaggccaaacagacgccgccagaacatcactactaccgccagaatacttcctaactggatcacaacttcaaaggttttcgccgtgtcgccctcaaaccccaacaagtgaccgacaataatcatatggcccgtgctggataccggcagaaattctgtcaatccttcgaccacacccaatattgccgctatcagcaggctgtgcatatcgctcatcaataaacccctaaattattaaaatgtaccgcttgtccgaactactgcgtatgaccaggttataaccgtttggtttaacagctgtaaaattaattattttctttcagattattgccacgctcaatgattacgccaacattcgccgcccgcgccactgcgcctggcttgctgagtttgatacgcacccacgggctgttgaagcgtgctaacagcagctccgccacctcttcagccacgcgttccaccagcgcaaaacgcgccccctcgacgtggctgaccaccgtttctgcaatgtcagcgtaactgaggcaatccgccacatcatcacttttcgccgctttacggttatcccacgccatttcgatatcgaacactaacttctgttcgatggtctgttcccagtcgtaaacaccaatagtggtgattacgctaagttgctctataaatacaatatccatcacgtcctgcctgctttttggctaaccggataccacttccggcgaaatgtgcgtattatccacagattcatcgttgaacacgaattttcaaaacggaacagcttatgagtgcaatcgcgcctggaatgatcctcatcgcgtacctctgcggctccatttccagtgccattctggtttgccgcttgtgtgggctgcccgatccgcgaaccagcggctccggcaatccaggcgcaaccaatgtgttacgtatcggtggcaagggagcagccgtagcagtactgattttcgacgttctgaaaggaatgttgcccgtctggggcgcgtatgaattaggtgtcagccccttctggctaggcttaattgccatcgccgcctgtcttggacacatctggcccgttttcttcggatttaaaggaggaaaaggcgttgctaccgcttttggtgccatcgcacccattggctgggatctcaccggagtaatggcgggaacctggttactgaccgtgctattgagcggatacagcagcctgggagcgattgtcagtgcactgattgctccgttttatgtctggtggtttaagccacaattcaccttcccggttagcatgctctcttgcctgatcctgctgcgtcatcatgacaacatccaacgtctgtggcgtcgtcaggagacaaaaatctggacgaaattcaaaagaaagcgcgaaaaggatcccgagtgatttctggtggatttacatgacctgatagccttcatcgggcttgcccagccgttgctggcaccatgccgccagaaattccacgcagacacgtaatttcatgctgcgatagagcggctcccggtaaacagcccagatattggcgctttgtgcatactctggcaatacttgcaccagtttgccactctccagaaacggcaacacatcccactcggaacgcagcataatccctttgccctccagcgcccattgcagcacaatctcgccgctattggaggaaagatgcccgcttaccttcacgctttttttctcctgaccgttccccaactcccatattccatgggtcatatcgcgctctttggtcaccagacagtcatgacgacttaattcctgtagggattgtggctgcggatatttttgcagatactcaggtgctgcgcataatattcttttattttttgtcaaaagatgcgcaatataataatcaggaatttcgtcattaatacgaatatccagatcaatattatcctgcactaaatcaatttgccgatcgaacaattcaaaatgcacctgtaactcaggataattgcgcatcagttcggtaatagctggcgcaatatggctgcgcccaaaaccaaaactgcaaccaatacgaatcatcccctccgggcgcgttttgatttgcgtgacgtcatcgaccagtcgctgatattgggtgaggatttccaacgcatgttcgtaacaacgttggccactttcagtcagcgccacgccgcgagcggagcggttcagcagcgttgttgccagcgtattttcaaggatttggatccgcttggtgacaaatgcaggcgtctgcccaagcgtcgccgctgcggcgctaaaactcccgctgtgaacgatttctaccagtacctgcaagtctttggctaaaggccagctattcagcatcgttaattatccgcagttgtgataagcgcagtgtatttcgcaaaacattgccattccctgctctggcgcaatattcattcttattttcgcgttgattcacgaactgttaattacatattcacggtggcaaaaaatataaaaccacatttttagtggtagtttgtggcggtgaatttttccagacaaatacaaaaactggagttgccatgatgagcgaaagtaataagcaacaggcagtgaataagttgacagagattgtcgctaactttaccgccatgatttctacccgaatgcctgatgacgtggtggataaactaaaacagctaaaggatgccgaaacgagcagcatggggaaaattatctaccatacgatgttcgacaacatgcaaaaagcgattgacctgaatcgtcctgcctgtcaggacaccggggagattatgttcttcgttaaagtcggttcccgcttcccactgcttggcgagctgcaaagcatactcaaacaagccgtggaagaggcaaccgtcaaagcgccactacgtcacaatgcggtagaaatttttgacgaagtaaacaccggcaaaaataccggtagcggcgtaccgtgggtcacctgggacatcatccccgacaatgacgatgcggaaatcgaagtttacatggcaggcggcggctgcacgctacctggccgcagcaaagtgttaatgccgagtgaaggctacgaaggcgtggtgaaattcgtcttcgaaaatatctccaccctcgccgtaaacgcctgtccaccggtactggtgggcgtgggcatcgccaccagcgtggaaaccgccgccgtactcagccgtaaagccattttgcgcccgattggcagccgccatcccaatccaaaagcggcagaactggagctacgcctggaagaaggactcaaccgtctggggattggtccacaagggctgaccggcaacagtagtgtgatgggcgtacatatcgaatctgccgcccgccatccgagtaccatcggcgttgctgtctctaccggctgctgggcgcatcgtcgcggcacgctgctggttcatgccgatctcacctttgaaaatctgtctcacacccggagcgcgttatgaaaaagatcctgacaaccccgatcaaagctgaagatctgcaagatattcgcgtcggcgatgtgatctacctgaccggtacgctggtgacctgccgcgacgtttgtcaccgccgtttgatcgaactgaaacgtccgatcccttacgatctcaacggcaaagcgattttccacgctggccccatcgtgcgcaaaaacggcgacaaatgggagatggtctccgtcggcccgacaaccagtatgcgtatggaaagttttgaacgtgaatttattgagcagaccggcgtgaaactggtggttggcaaaggtggtatggggccgctgaccgaagaaggctgccagaaattcaaggcgctacatgtgattttcccggcaggctgcgcggtgctggcggcaacccaggtggaagagattgaagaagtgcactggacagagctcggaatgccggagagtctgtgggtctgccgggtcaaagagttcggcccgctgattgtctctattgatacccacggcaacaacctgatagccgaaaacaaaaagctgttcgccgaacgccgcgatcccatcgtggaagagatctgcgagcacgtccattacatcaaataaccctcccggagaggctcacccctctcctttttcgcaggcataacacgatgaaaccttccactgaatggtggcgatatcttgcgccgctggcggtcatcgccattattgctctacttccggttcccgcagggctggagaaccatacctggctctactttgccgtttttactggcgtgatcgttggactgatcctcgaacccgtgccgggtgccgtggtggcgatggtgggtatatccatcatcgccatactctctccctggctgctgttcagcccggagcagctcgctcagccaggctttaaattcactgcaaaatccctcagctgggccgtttccggtttttctaatagcgttatctggctgattttcgccgcctttatgtttggcacaggctatgaaaaaaccgggcttggacgccgcattgcgctgattctggtgaaaaagatgggacatcgcacgctgtttctcggctatgcggtgatgttctccgagctgatcctcgcacctgtaacaccgtccaacagcgcgcgtggtgcggggattatctatcccatcatccgtaacctgccaccgctctatcaaagtcaaccaaacgacagcagtagccgcagcattggcagctacatcatgtggatggggattgttgccgactgcgtgaccagcgccattttcttgacggcgatggcaccaaacttgctgttaattggactgatgaaaagcgcatctcacgccacgctgagttggggcgactggttcctcgggatgttgccgctcagcattttactggttctgctggttccctggctggcttacgtgctgtacccgccggtactgaagtctggcgatcaggtgccgcgctgggcagagacggaactgcaggcaatgggcccgctctgtagccgtgaaaaacggatgctggggctgatggtaggcgcgctggtgctgtggattttcggcggtgattatatcgatgccgcgatggtcggttacagcgtggtggcactgatgctgcttctgcgcattatcagttgggacgacattgtcagtaataaagcggcgtggaacgttttcttctggctggccagccttatcaccctcgccaccggactcaacaacaccggttttattagctggtttggcaaactgttagcaggcagcttaagcggttatagcccaacgatggtgatggtggcgttgattgtggtgttttatctactgcgctactttttcgccagcgccacggcgtatacctccgctctcgcaccgatgatgattgctgctgcgctggcgatgccggaaatcccgctgccggtgttctgcctgatggttggtgcggcaattggtctggggagcattcttacaccatacgccaccggccccagtccgatttactacggcagtggttatctgccaacggcggattactggcgactgggggcgatttttgggctgatattcctcgtattgctggtgattaccggcttactgtggatgcccgtggtgttgctttaagtgaggacggtgccggaaattgctctccggcacccaatagttttacgcagccggtaactccgccagcggccagcgcggacgcacgctaacgccgagatccgccgtcgcgcctgctttaaaccgcaccattccggcataggcgatcatcgcgccgttatcagtacaaaattccggacgcgcgtagaacacttcgccgcggcgttttttcatcatttcagccagcttcgcccgtaacgtacggttagcactcacgccgcccgccatgaccagtcgcttaaagcccgtctgacccagcgcccgcttgcacttaatcatcagcgtatcgaccaccgcatcttcaaaggcgcgggcgatatcagcacgcgtctggtcgtcggtgccgttgtcacgaatggtatttgccgcgaaggttttcaggccggagaagctgaaatccagccccggacggtcggtcatcggacgcgggaagacaaagcgcccggcagtaccctgagccgccattttgctcagtaacggcccgccaggataatccagccccagcagcttcgcggttttatcaaacgcttccccggcggcatcatcgatagactcgccgagcagctcgtactgaccaatgccagtcacgctgattaactgcgtatgaccgccggaaacaagcagcgcaacaaacggaaattccggcgggttatcttccagcatcggcgctaacagatgcccttccatatggtgtacagggatcgccggaacgtcccaggcaaacgccagagaacgccccacggtcgcgccaaccagtagcgcgccgactaatccagggcctgcggtataggccacagcatcaatgtcttttgccgttaaaccagactcctttagcgccgcctggatcaacggtacggttttacgcacatgatcgcgggaggccagttcaggcacgacgccgccgtagtcagcgtgcaatttcacctgactatacaattggttggctaacaaacctttttcatcgtcgtaaatggcgatgccggtttcatcgcaggaagtttcaatacccagtacacgcatgacttgttttacctcgctttattaccgcgcagtgtaggaccaatgcgggttgatgtaaaactttgttcgcccctggagaaagcctcgtgtatactcctcacccttataaaagtccctttcaaaaaaggccgcggtgctttacaaagcagcagcaattgcagtaaaattccgcaccattttgaaataagctggcgttgatgccagcggcaaaccgaattaatcaaaggtgagaggcacatgccggtaattaaagtacgtgaaaacgagccgttcgacgtagctctgcgtcgcttcaagcgttcctgcgaaaaagcaggtgttctggcggaagttcgtcgtcgtgagttctatgaaaaaccgactaccgaacgtaagcgcgctaaagcttctgcagtgaaacgtcacgcgaagaaactggctcgcgaaaacgcacgccgcactcgtctgtactaattccccgagagcgttgctctccgatcagaccgagttgtagttgtaaggccgtgcttccgaaaggaatgcgcggcttattttcgtttatgaattgctaaaaatcggggcctatggctggacgaatcccacgcgtattcattaatgatctgctggcacgcactgacatcgtcgatctgatcgatgcccgtgtgaagctgaaaaagcagggcaagaatttccacgcgtgttgtccattccacaacgagaaaaccccgtccttcaccgttaacggtgagaaacagttttaccactgctttggatgtggcgcgcacggcaacgcgatcgacttcctgatgaactacgacaagctcgagttcgtcgaaacggtcgaagagctggcagcaatgcacaatcttgaagtgccatttgaagcaggcagcggccccagccagatcgagcgccatcagaggcaaacgctttatcagttgatggacggtctgaatacgttttaccaacaatctttacaacaacctgttgccacgtctgcgcgccagtatctggaaaaacgcggattaagccacgaggttatcgctcgctttgcgattggttttgcgccccccggctgggacaacgtcctgaagcggtttggcggcaatccagaaaatcgccagagtttgattgatgcggggatgttggtcactaacgatcagggacgcagttacgatcgtttccgcgagcgggtgatgttccccattcgcgataaacgcggtcgggtgattggttttggcgggcgcgtgctgggcaacgatacccccaaatacctgaacagcccggaaacagacattttccataaaggccgccagctttacggtctttatgaagcgcagcaggataacgctgaacccaatcgtctgcttgtggtcgaaggctatatggacgtggtggcgctggcgcaatacggcattaattacgccgttgcgagcttaggtacgagtaccaccgccgatcacatacaactgttgttccgcgcgaccaacaatgtcatttgctgttatgacggcgaccgtgcaggccgcgatgccgcctggcgagcgctggaaacggcgctgccttacatgacagacggccgtcagctacgctttatgtttttgcctgatggcgaagaccctgacacgctagtacgaaaagaaggtaaagaagcgtttgaagcgcggatggagcaggcgatgccactctccgcatttctgtttaacagtctgatgccgcaagttgatctgagtacccctgacgggcgcgcacgtttgagtacgctggcactaccattgataagccaagtgccgggcgaaacgctgcgaatatatcttcgtcaggaattaggcaacaaattaggcatacttgatgacagccagcttgaacgattaatgccaaaagcggcagagagcggcgtttctcgccctgttccgcagctaaaacgcacgaccatgcgtatacttatagggttgctggtgcaaaatccagaattagcgacgttggtcccgccgcttgagaatctggatgaaaataagctccctggacttggcttattcagagaactggtcaacacttgtctctcccagccaggtctgaccaccgggcaacttttagagcactatcgtggtacaaataatgctgccacccttgaaaaactgagcatgtgggacgatatagcagataagaatattgctgagcaaaccttcaccgacagtctcaaccatatgtttgatagcctgcttgaactgcgccaggaagagttaatcgctcgtgagcgcacgcatggtttaagcaacgaagaacgcctggagctctggacattaaaccaggagctggcgaaaaagtgatttaacggcttaagtgccgaagagcgatcgggaagcccccgacagccgcactgagaggcagcggcaaatatataagtacgccctcgtaattatcgttggcggtaaacaaccgttggatttcagcgttaacggctgaaggacatcgggtcaatcgcccaacaccaacctcatgaaataagtgtggataccgtcttatggagcaaaacccgcagagtcagctgaaacttcttgtcacccgtggtaaggagcaaggctatctgacctatgccgaggtcaatgaccatctgccggaagatatcgtcgatagtgatcagatcgaagacatcatccaaatgatcaacgacatgggcattcaggtgatggaagaagcaccggatgccgatgatctgatgctggctgaaaacaccgcggacgaagatgctgccgaagccgccgcgcaggtgctttccagcgtggaatctgaaatcgggcgcacgactgacccggtacgcatgtacatgcgtgaaatgggcaccgttgaactgttgacccgcgaaggcgaaattgacatcgctaagcgtattgaagacgggatcaaccaggttcaatgctccgttgctgaatatccggaagcgatcacctatctgctggaacagtacgatcgtgttgaagcagaagaagcgcgtctgtccgatctgatcaccggctttgttgacccgaacgcagaagaagatctggcacctaccgccactcacgtcggttctgagctttcccaggaagatctggacgatgacgaagatgaagacgaagaagatggcgatgacgacagcgccgatgatgacaacagcatcgacccggaactggctcgcgaaaaatttgcggaactacgcgctcagtacgttgtaacgcgtgacaccatcaaagcgaaaggtcgcagtcacgctaccgctcaggaagagatcctgaaactgtctgaagtattcaaacagttccgcctggtgccgaagcagtttgactacctggtcaacagcatgcgcgtcatgatggaccgcgttcgtacgcaagaacgtctgatcatgaagctctgcgttgagcagtgcaaaatgccgaagaaaaacttcattaccctgtttaccggcaacgaaaccagcgatacctggttcaacgcggcaattgcgatgaacaagccgtggagcgaaaaactgcacgatgtctctgaagaagtgcatcgcgccctgcaaaaactgcagcagattgaagaagaaaccggcctgaccatcgagcaggttaaagatatcaaccgtcgtatgtccatcggtgaagcgaaagcccgccgtgcgaagaaagagatggttgaagcgaacttacgtctggttatttctatcgctaagaaatacaccaaccgtggcttgcagttccttgacctgattcaggaaggcaacatcggtctgatgaaagcggttgataaattcgaataccgccgtggttacaagttctccacctacgcaacctggtggatccgtcaggcgatcacccgctctatcgcggatcaggcgcgcaccatccgtattccggtgcatatgattgagaccatcaacaagctcaaccgtatttctcgccagatgctgcaagagatgggccgtgaaccgacgccggaagaactggctgaacgtatgctgatgccggaagacaagatccgcaaagtgctgaagatcgccaaagagccaatctccatggaaacgccgatcggtgatgatgaagatagccatctgggggatttcatcgaggataccaccctcgagctgccgctggattctgcgaccaccgaaagcctgcgtgcggcaacgcacgacgtgctggctggcctgaccgcgcgtgaagcaaaagttctgcgtatgcgtttcggtatcgatatgaacaccgactacacgctggaagaagtgggtaaacagttcgacgttacccgcgaacgtatccgtcagatcgaagcgaaggcgctgcgcaaactgcgtcacccgagccgttctgaagtgctgcgtagcttcctggacgattaatcggtaggccggatcaggcgttacgccgcacccggcactaggccctctgcacaaacgccaccttttcggtggcgttttttatcgcccacgcactaccagcgcctggtccagctcgcgatacgcttcaaccagtttctccagactaacgcgacttaaaccgctgggatttggcagcacccaaatctgcgtgctaccaatggtgagcgtttgtttcccccactgtgcaccgcgctggctgaatccctgttcatatgcttgtttgcccagaatcgccaacgcctgcggctgataatcttcaattttttcaatcagcttacgcccgcctgcgtgtagctcctgcttactaacttcattggcttgcaccgttggacggtctaccagtttggtgacgccacaacgataatccagcagatgctgtgcctcctgcggcttcaactgacggtcggtaaacccggcctgatatatcaccttccagaagcgatttgccggatgagcaaagggaaaaccagtcccggcggaactaagcccagggttgataccgcaaaacacgacccgtaaccctggagccaaaatatcctcaaccatatttactcctttctaacatcaccaggaaaagtataacggattgaaaatacattgtttataaaaacagcaggcgcgcggtaatggctggattgcgacacggagttactttataatccgctaccatggccccttagctcagtggttagagcaggcgactcataatcgcttggtcgctggttcaagtccagcaggggccaccagatatagcaaaggctgacgagaaatcgtcagcctttttctttttatatatcagttactttgcgtgccagtaagccgctgcacgtacccgctgtgggtcatactgttccgcttcaaagcggcggcttaaattcttaacgactttaccttcgccggttatccagatgaagtaatcatcggcagggatttgcatctgcgccagacgcgcatctaccgcctgctcatcatgtgccagccattcgatattaaaaccatcaaggtgcgcgagataatcctgacaggcgttatcccgcacgctaaccagcgcactaacttgcggtttaacggcaagtttgctcaacgtttccaggcggcggcgcaatgcaggcattccggattcatcgcagacatacagctgatacgcgtaatcttccggcaccaccaggctaccgcgcggacctgccaccgtaagtttatcgcccggttgcgcctgcatcgcccagccgctggcgaccccaccgtcgtgaataaagaaatcaatcgccagttcatggcgtagttcgtcatacagcggcgtatagtcacggctcggtgggcgtggtccttccggccagacgatgccctcttccgttaccgttggcggcacaaagtgagcgtcaggttgaggaaagaagagtttgctgtgatcgtcaaagccacggcttgtaaaaccgtccagcgcctcgccgccgaggacaatgcgctgaaaaccggcgctgatgcgctcaacgcgtaacacagtcagttcacggaagcgcagatcattgcgaacgcgctgcgggtagcggggggtgttattcattgttatcgccttcgtgatggtaatcagatatatctaaataaaactcgcaaatgataatgattgttaatcatgataaatgcaagcgatttgtagaactgatatgtctatagtctgataagacgaaccgcctcttctcaggcatcattactcaacgccggatgcggcgtgaacgccttatccggcctacgtgtgagatgagtccacgtttaaaaatcatttttacacttgcaagaacgctcatatcagatataaattagatatatctaattaagcaaaaggaggctgatatgagccatcatcacgaagggtgttgtaaacatgaaggccagccacgccatgagggctgctgcaaaggtgagaagagtgaacacgagcactgcggacacggtcaccagcatgaacacggtcaatgctgcggtggtcgccacggtcgcggcggcggtcgtcggcaacgtttctttggtcacggtgaattacgtctggtgattctggatattctcagccgcgatgacagccacggttacgaattgattaaagcgattgagaatctaacccaggggaattacaccccaagcccgggcgtcatctacccaacgctggattttctgcaggagcagagcctgattaccatccgcgaagaggaaggaggtaagaagcagattgcgctgaccgaacaaggcgcgcagtggctggaagaaaaccgcgaacaggtggagatgattgaagaacgcatcaaagcgcgttgcgttggcgcggcgctgcgccagaacccgcaaatgaagcgggcgctggataattttaaagcggtgctggatttacgcgtcaaccagagcgatatcagtgatgcacaaataaaaaagatcattgcggtgatcgaccgcgccgcttttgatattacgcaactggattaatcgccgcatccgccagtggcgcggtgcaattgccggatgcgacgcttgacgcgccttatccggcctacacccgctacacaccccgcaggcctgataagatgcgccagcatcgcatcaggcattgtgctccaaccgccggatccggcataccgattaatgcagtaccgtcaccgcgtcttccagtcggctggcgcggtgtttcaccatcgcgctcacctgcgcactctcttccaccagctcggcatttttctgggtgatcaggttaagctcatccactgcacgggtcaggctggaaagcccatcggcctgttccagcgtactatggctaatctgggcgatcaactgggtgacgtttttcacctgtgccacaatatcttccatcgtccgtccggcggcgtgtacctgctggctaccggattgcaccttatcagcactggcatcaatcagcttgcgaatatcgttggcagcattagcgctgcggctggctaaatgacgcacttcccctgccaccactgcaaaacctttgccctgttcgccggcacgcgccgcttccaccgccgcattcagggccagaatattggtctgaaacgcaatatcgttaatcaggctagtaatggtgccaatgcgctgggtactgtcggcgatatcgtccattgtcttgatcaccgtggtcatcgcctccccaccctgcactgccgcattactggcagtgatactcagtttatcggcagcgctcgccgtggcagagttctgtttcacgctcgccgccatttggttcatggtcgccaccgtttgctgaacgttatcaactgtctgctgggtatgttcgttcagttcatcggtgcctttcgccagcgtctcactgccatttctgacactggacacctggctactgacatcgttaattagccaacggcacatcaggccaagttgccctaccgcacgtaatgtcagccccagctcatcgctgcgattcagatgctcaacactattacgttctccggtcgccaccttcagtgcctgatgggcaacattttctatcgggcgcacaatctgccattcaaaacaggcgcttgccaacaataccactaacgcacagaggatatacgtcaccaccggggcagcaacaaaccaaagcatggccgccagcaagataaacatcagggtcatcactccacgcgcccgccagcgaagcggtaaactaggcagtttacccagccagcctttacgcaccaccaggcctttatgaatacgcttactggtacgtccggcgttcaacgctttgtacagcggctccaccgccgcgatctcttcatccgtcgcccgggtacgaatgctcatatagccactgatttttccctcgcgcaccatcggtaccgcattggcccgcacccaataatggtcaccatttttgcggcgatttttcacgatgccgctccagggctccccttttttcagggtgaaccacatatccgcaaacgccgcttttggcatatccgggtgacgcaccatgttgtgcggctgcccttgtaactcttgcaaggtatagccgctcacctgcacaaaagtgtcattagcatgagtgatatagctttgcagatcggtagtggacatcagagtggtatcgtccgccagcggggtattttgctgggtgacatacggatgagaagacatgttcgcgtcctgtgcaggttatatggttgttaacttcttgtcagagtttatgtcggccccgctgcggttatctttaaccgattaatttgatttagatcgcaatttgcgatttaaacacaaatctaattccttgatttaaaatactttcactctgttactatacgaaaacgttaattatcttgcccaaaaatcaggcaattattgccctgaaaacgtgcatttgcgcagcaatcatcaaatccatacccgacaaaaaccgtgcaaaataacaacaaatgttaacagatagcattaaatattgcacaaatgataaccgaatttgtgtttatcccgattttcgcgatcgcagccggagtggcgcaatccctgcaatacttaaatcggtatcatgtgatacgcgagcctccggagcatattttgaacaggttacctagcagcgcaagcgctttagcgtgcagcgcccacgccctgaatctcattgagaagcgaacgctggatcatgaggagatgaaagcacttaaccgagaggtgattgaatacttcaaagagcatgtcaatccggggtttttagagtatcgcaaatctgttaccgccggcggggattacggagccgtagagtggcaagcgggaagtttaaatacgcttgtcgacacccagggccaggagtttatcgactgcctgggaggttttggaattttcaacgtggggcaccgtaatccagttgtggtttccgccgtacagaatcaacttgcgaaacaaccgctgcacagccaggagctgctcgatccgttacgggcgatgttggcgaaaacccttgctgcgctaacgcccggtaaactgaaatacagcttcttctgtaatagcggcaccgagtccgttgaagcagcgctgaagctggcgaaagcttaccagagtccgcgcggcaagtttacttttattgccaccagcggcgcgttccacggtaaaagtcttggcgcgctgagcgccacggcgaaaagcaccttccgcaaaccgtttatgccgttactgccgggcttccgtcatgtgccgtttggcaatatcgaagccatgcgcacggctcttaacgagtgcaaaaaaaccggtgatgatgtggctgcggtgatcctcgaaccgattcagggtgaaggtggcgtaattctgccgccgccgggctatctcaccgccgtacgtaagctatgcgatgagttcggcgcactgatgatcctcgatgaagtacaaacgggcatggggcgcacgggcaagatgttcgcctgcgagcatgagaacgtacagccggatatcctctgccttgccaaagcgctcggcggcggcgtgatgccgattggcgcgaccatcgccactgaagaggtgtttagtgttctgttcgacaacccattcctgcataccaccacctttggcggcaacccgctggcctgtgcggcggcgctggcgaccatcaatgtgttgctggagcagaacttaccggctcaggctgagcaaaaaggcgatatgttgctggacggtttccgtcaactggcgcgggaatatcccgatctggtacaggaagcgcgtggtaaagggatgttgatggcgattgagtttgttgataacgaaatcggctataactttgccagcgagatgttccgccagcgcgtactggtggccggaacgctcaataacgccaaaacgatccgcattgaaccgccactgacactgaccattgaacagtgtgaactggtgatcaaagcggcgcgtaaggcgctggcggccatgcgagtaagtgtcgaagaagcgtaatatcaaatcggatggcgatacgacgtcgccatccgatctttttatacgacgcgtacgcccgcaggcatcatccgctccggcgttaacagcacgctttcactgccgtcatcggtttccgcacacaacagcatgcattcgctcgtttcaccacgcattttcgctttttgcagattgcataagaccaccaccgttttccccatcagctcttcttcgctgtagtacggcaccaggctggtcacggtttgcagcgttttttgccccacatcaacctgtacgatgtacagcttgtcggcgttttcatggcgtttcacttccacaatctttccgacgcgcatttccagacgtgcaaaatcagcgtaagccacggtttccattgcttcctcccttagggtaaaattttactaaactatagcaaaagtttttctcaatcctgtaggctaaaaatggagaatgcaggcgtgatcacattcgtgagccgctgtgttaccgttacagcgtcaaagaaacgcgctttatttactgaaaacaggtgacccgataagcacttcctctacaatgggggcgcacatcagggaaagtaaaaaaggtaaacatggcaacactaaaagacatcgcaatcgaagctggcgtatccctggcgacagtatccagggtcttaaatgacgatccgacattgaatgtgaaagaagagacgaaacatcgcattctcgagatcgccgaaaagctggagtacaagaccagtagtgcccgtaaactccagacaggtgcagtcaaccaacaccatattctggctatctacagctaccagcaggagctggagatcaacgatccttactatctggcgatccgccacggcattgaaacccagtgcgaaaagctgggcatcgagctcaccaactgttatgaacacagcggcttaccagacattaaaaacgtcaccggtattttaattgtcggcaaacccacgcccgccctgcgcgccgctgccagcgcgttgaccgacaatatctgttttatcgactttcacgaacccggcagcggttacgatgcggtggatatcgatctggcacgcatcagtaaagaaatcatcgacttctatatcaaccagggcgttaatcgtattggttttattggcggtgaagatgagcctggcaaggcggatattcgtgaggtcgcctttgcggaatatggccgactgaaacaagtggtacgcgaagaggatatctggcgcggcggtttttccagtagcagcggttatgaactggcaaaacaaatgctggcgcgggaagactatccgaaggcactgtttgttgcttccgattccattgctatcggcgtactgcgggcaattcatgaacgaggcctgaacatcccacaggatattagccttatcagcgttaacgatatccccaccgcgcgatttacctttccgccgctctccaccgtgcgcatccattccgagatgatgggaagtcagggcgttaacctggtgtatgaaaaagcccgcgatggtcgcgcgctgccgctgttagtcttcgttcccagcaaattaaaactgcgcggcacgacccgttaaatccccttacacactgtccggcaatcgtttttgccggacagtgctgccgtttattttcgtgatccagttaaagtaaatgcatttacctgctactttttagtaaaaattttactaaactccccagcaattacacaaactaccatcaccatgaatggttccgatttctctctaccgggaggccctatgaatcgctgggaaaacattcagctcacccacgaaaaccgacttgcgccgcgtgcgtacttttttagttatgattctgttgcgcaagcgcgtacctttgcccgcgaaaccagcagcctgtttctgcccttaagcggtcagtggaatttccacttttttgaccatccgctgcaagtaccagaagccttcacctctgagttaatggctgactgggggcatattaccgtccccgccatgtggcaaatggaaggtcacggcaaactgcaatataccgacgaaggttttccgttccccatcgatgtgccgtttgtccccagcgataacccaaccggtgcctatcaacgtattttcaccctcagcgacggctggcagggtaaacagacgctgattaaatttgacggcgtcgaaacctattttgaagtctatgttaacggtcagtatgtgggtttcagcaagggcagtcgcctgaccgcagagtttgacatcagcgcgatggttaaaaccggcgacaacctgttgtgtgtgcgcgtgatgcagtgggcggactctacctacgtggaagaccaggatatgtggtggagtgcggggatcttccgcgatgtttatctggtcggaaaacacctaacgcatattaacgatttcactgtgcgtaccgactttgacgaagcctattgcgatgccacgctttcctgcgaagtggtgctggaaaatctcgccgcctcccctgtcgtcacgacgctggaatataccctgtttgatggcgaacgcgtggtgcacagcagcgccattgatcatttggcaattgaaaaactgaccagcgccagctttgcttttactgtcgaacagccgcagcaatggagtgcagaatccccttatctttaccatctggtcatgacgctgaaagacgccaacggcaacgttctggaagtggtgccacaacgcgttggcttccgtgatatcaaagtgcgcgacggtctgttctggatcaataaccgttatgtgatgctgcacggcgtcaaccgtcacgacaacgatcatcgcaaaggccgcgccgttggaatggatcgcgtcgagaaagatctccagttgatgaagcagcacaatatcaactccgtgcgtaccgctcactacccgaacgatccgcgtttttacgaactgtgtgatatctacggcctgtttgtgatggcggaaaccgacgtcgaaagccacggctttgctaatgtcggcgatattagccgtattaccgacgatccgcagtgggaaaaagtctacgtcgagcgcattgttcgccatatccacgcgcagaaaaaccatccgagcatcatcatctggagcctgggcaatgaatccggctatggctgtaacatccgcgcgatgtaccatgcggcgaaagcgctggatgacacgcgactggtgcattacgaagaagatcgcgatgctgaagtggtcgatattatttccaccatgtacacccgcgtgccgctgatgaatgagtttggtgaatacccgcatccgaagccgcgcatcatctgtgaatatgctcatgcgatggggaacggaccgggcgggctgacggagtaccagaacgtcttctataagcacgattgcattcagggtcattatgtctgggagtggtgcgaccacgggatccaggcacaggacgaccacggcaatgtctggtataaattcggcggcgactacggcgactatcccaacaactataacttctgtcttgatggtttgatctattccgatcagacgccgggaccgggcctgaaagagtacaaacaggttatcgcgccggtaaaaatccacgcgcgggatctgactcgcggcgagttgaaagtcgaaaataaactgtggtttaccacgcttgatgactacaccctgcacgcagaggtgcgcgccgaaggtgaaacgctcgcgacgcagcagattaaactgcgcgacgttgcgccgaacagcgaagcccccttgcagatcacgctgccgcagctggacgcccgcgaagcgttcctcaacattacggtgaccaaagattcccgcacccgctacagcgaagccggacaccctatcgccacttatcagttcccgctgaaggaaaacaccgcgcagccagtgcctttcgcaccaaataatgcgcgtccgctgacgctggaagacgatcgtttgagctgcaccgttcgcggctacaacttcgcgatcaccttcagtaaaatgagtggcaaaccgacatcctggcaggtgaatggcgaaagcctgctgactcgcgagccaaagatcaacttcttcaagccgatgatcgacaaccacaagcaggagtacgaagggctgtggcaaccgaatcatttgcagatcatgcaggaacatctgcgcgactttgccgtagaacagagcgatggtgaagtgctgatcatcagccgcacagttattgccccgccggtgtttgacttcgggatgcgctgcacctacatctggcgcatcgctgccgatggccaggttaacgtggcgctttccggcgagcgttacggcgactatccgcacatcattccgtgcatcggtttcaccatgggaattaacggcgaatacgatcaggtggcgtattacggtcgtggaccgggcgaaaactacgccgacagccagcaggctaacatcatcgatatctggcgcagcaccgtcgatgccatgttcgagaactatcccttcccgcagaacaacggtaaccgtcagcatgtccgctggacggcactgactaaccgccacggtaacggtctgctggtggttccgcagcgcccaattaacttcagcgcctggcactatacccaggaaaacatccacgctgcccagcactgtaacgagctgcagcgcagtgatgacatcaccctgaacctcgatcaccagctgcttggcctcggctccaactcctggggcagcgaggtgctggactcctggcgcgtctggttccgtgacttcagctacggctttacgttgctgccggtttctggcggagaagctaccgcgcaaagcctggcgagctatgagttcggcgcagggttcttttccacgaatttgcacagcgagaataagcaatgaggatcatcgataacttagaacagttccgccagatttacgcctctggcaagaagtggcaacgctgcgttgaagcgattgaaaatatcgacaacattcagcctggcgtcgcccactccatcggtgacagtttgacttaccgcgtggagacagactccgcgaccgatgcgctatttaccgggcatcgacgctattttgaagtgcattactacctgcaagggcagcaaaaaattgaatatgcgccgaaagagacattacaggtagtggaatattatcgtgatgaaactgaccgtgaatatttaaaaggctgcggagaaaccgttgaggtccacgaagggcaaatcgttatttgcgatatccatgaagcgtatcggtttatctgcaataacgcggtcaaaaaagtggttctcaaagtcaccatcgaagatggttatttccataacaaataacaactacggcggcaaaaggagtttgccgccaccgctaccctactcattttcggagatgtgttatgtctgataccaaacgtaatacaatcggcaaattcggcttgctcagcctgacttttgccgccgtttacagctttaacaacgttatcaataataatattgagcttggactggccagcgcaccgatgtttttcctcgcgacgattttttattttattcccttctgtctgatcatcgcagaatttgttagcttaaataaaaacagtgaagccggtgtctacgcgtgggtaaaaagtagcctgggcggacgttgggcatttattactgcctatacctactggttcgtaaacctgttctttttcaccagtctgttgccgcgcgttattgcttatgctagctatgccttcctcggatacgaatatattatgacgccggttgccaccaccattatcagtatggtgctgttcgccttctccacctgggtttccaccaacggggcgaaaatgttggggccaattacctccgtcactagtacgctgatgctgctgttaacgctctcctacattttactggcaggtacggcgctggttggcggcgtacagcctgctgacgccatcaccgttgacgcgatgatcccgaacttcaactgggcgttcctcggcgttaccacctggatctttatggccgcaggtggcgcggagtccgtcgctgtgtacgttaacgacgtcaaaggcggtagcaaaagcttcgttaaagtgatcatcctcgccgggatttttatcggcgtactgtattccgtctccagcgtgctgattaacgtcttcgtcagcagcaaagagttgaaatttaccggcggaagcgtgcaggtattccacggcatggcggcgtattttggtctaccggaagcgttgatgaatcgctttgtcggtctggtgtcctttaccgcgatgttcggttccctgctgatgtggaccgcaacgccggtgaaaattttcttctccgaaatcccggaaggcatctttggtaagaaaaccgtcgaactgaacgaaaacggcgttccggcgcgcgcagcgtggatccagttcctgatcgtcatcccgctgatgattatcccgatgctcggttccaataccgtgcaggatctgatgaatactattattaatatgaccgccgcagcgtccatgcttccgccgttattcatcatgctggcttacctgaatttacgcgccaaattagatcacctgccacgcgatttccgtatgggctcccgccgcaccggtattatcgttgttagtatgctgattgcgatatttgccgtagggtttgtcgctagcacattcccgactggcgcgaatattctgaccatcattttttataacgtcggcggtattgttatcttccttggctttgcgtggtggaaatacagtaaatatataaagggattaacggctgaagagcgccatattgaagcgacgccagccagcaatgttgattaagcagaataataaaaaatgagcaggcattttccctcttcctggatgaggagagggaaaatagtttctgcctttatatttttataattacaacgataaaaggctgtactttttctttagctcatggattaacacaatgaaattaatcactgcaccatgcagagcattacttgctctgccgttttgctacgccttttctgcggcaggagaagaagcacgtccggcagaacatgacgacacaaaaacacccgcaattaccagcacatcttctcctagttttcgtttttacggcgaattaggggttggtggatatatggatttagagggtgagaataaacataaatacagcgacggtacctatattgaaggtggcctggagatgaagtacggctcctggttcggcctgatttacggcgaaggctggaccgtgcaggccgaccacgacggcaatgcctgggtgccagaccatagctggggtggtttcgagggcggaattaaccgtttctatggcggttatcgtaccaatgatggcaccgaaatcatgctcagtctgcgtcaggattccagcctggatgacctgcaatggtggggcgatttcacccccgatctgggctacgtcattcccaatacccgcgacattatgactgcgctgaaggtacagaacttaagcggcaactttcgttatagcgtcaccgcgactcctgccggacatcatgatgaaagcaaagcctggctacattttggcaaatacgatcgctatgacgacaaatacacctatccggcaatgatgaacggttacatccagtatgaccttgccgaaggcatcacctggatgaacggtctggaaatcaccgacggcacaggacagctctatctcacgggcctgctaactcctaactttgccgctcgcgcctggcaccataccggacgcgccgacgggctggacgtaccgggaagtgaaagtgggatgatggtgagcgccatgtatgaagcgttaaagggcgtttatctctccaccgcttacacctacgccaaacatcgccctgaccacgctgacgatgaaaccacctctttcatgcagtttggtatctggtacgaatacggcggcggacgtttcgccacggcttttgatagccgcttctacatgaaaaatgcctctcacgatcccagcgaccaaatcttcctgatgcaatatttctactggtaataaggactgtaatttcatgaaaataaaaactattttaacgccagtaacctgcgctctgctgataagtttttccgcccatgccgctaacgccgacaattataaaaacgtgattaaccgtactggcgcgccgcagtacatgaaggattacgattacgacgatcaccagcgttttaatccgtttttcgatctcggagcctggcatggtcatctgttgccagacggccctaacaccatgggcggctttccgggcgttgcgctgctgacggaagagtacatcaactttatggccagcaatttcgaccgcctgaccgtctggcaggacggcaagaaagtcgactttacgctggaggcatacagtattcccggtgcgctggtgcaaaaactgacagcaaaagatgtgcaagtcgaaatgactctgcgcttcgccacgccgcgcacgagtctactggaaaccaaaatcaccagcaataaaccgctggatctggtgtgggacggcgaactgctggaaaaactggaagcgaaagaagggaaaccgctttccgataaaaccattgctggcgaataccctgactatcagcgcaaaatcagcgccacccgtgatggcctgaaagtcacctttggcaaagtgcgcgccacctgggatctgctgacctccggcgaaagcgaatatcaggtgcataaatccctgccggtgcagactgaaatcaacggtaatcgctttaccagtaaggcgcatatcaacggtagcaccacgctctacaccacctattcccatctgctgaccgctcaggaagttagcaaagagcaaatgcagatccgcgatattctggcgcgtccggcgttttatctcaccgccagccagcaacgctgggaagaatacctgaagaaagggttaaccaatccggatgcgacgccggaacagacgcgcgtcgcggtgaaagcgatcgaaacgctcaacggtaactggcgcagtccgggcggtgcggtgaaatttaacaccgttacaccgagcgtgaccgggcgctggttctccggcaatcagacctggccgtgggatacctggaagcaggcgtttgcgatggcgcatttcaatccggacatcgccaaagagaatatccgcgcggtcttctcctggcagatccagcctggcgatagcgtgcgtccgcaggatgtgggctttgtccccgacctgatagcgtggaaccttagccccgagcgtggtggcgatggcggcaactggaacgaacgtaataccaaacccagccttgccgcctggagcgtgatggaagtgtataacgtcacccaagataaaacctgggtggcagagatgtacccgaaactggtggcctatcacgactggtggttacgtaaccgcgatcacaacggcaacggcgtgccggaatatggcgcgacccgcgacaaagcccacaacactgagagcggcgagatgctgtttacggtgaaaaaaggcgataaagaagagacgcagtctgggctgaacaactacgcccgcgtggtggagaaaggccagtacgacagtctggaaattccggcacaggttgctgcaagctgggaaagcgggcgtgatgatgccgccgtctttgggtttatcgacaaagaacagttggataaatatgtcgctaatggcggcaaacgtagcgactggacggtgaaattcgccgaaaaccgcagtcaggacggaacgttgctgggctacagcctattgcaggagagcgtggatcaggccagctatatgtacagcgataaccattatctggcggagatggcaaccatcctcggtaagccagaagaggccaaacgctatcgccagttggcacagcagctcgcggactacatcaacacctgtatgttcgacccgactacccagttctactatgacgtacgtattgaagataaaccactggcgaacggctgcgcgggcaaaccgattgttgagcgcggtaaagggccggaaggctggagcccgctgtttaacggtgcggcaacgcaggccaatgccgacgcggtggtgaaggtgatgctcgatcctaaagagttcaacacctttgtcccgctgggaacggcggcgttaaccaatccggcttttggcgctgatatctactggcgtgggcgcgtatgggtggatcagttctggtttggtctgaaagggatggagcgttacggttatcgtgatgatgccctgaagctggcggatacgttcttccggcacgccaaagggttaaccgccgatggaccaattcaggaaaattacaacccgctgacaggcgcacagcaaggcgcaccaaatttctcctggagtgccgcgcatttgtatatgttgtataacgattttttccgtaagcaataatttgcaactgctggcggatgcggcgtaaacgccttatccgccctacatgtgcaatcctcctggccggataaaacgcggcaagcgttgcatccggcaactgcaccgcgccactggcggatgcggcgtgaacgccttatccgccctacatgtgtgttcccgtaggtcggataagacgcgacaagcgtcgcatccggcatctgcaccgcgccactggcggatgcggcgtggacgccttatccgccctacatgtgcaattccgtaacctggataaaacgcgacaagcgtcgcatccggcgttatcaccgggcgtattctttttgaatcccatcacaaaccccgcactccccttttcccttttctccggcgacggctaaattagaactcatccgaccacataacaattattttacatactggacaattttatgagctacccgagcctgttcgccccgctggatttaggttttaccacgttaaaaaaccgcgtgttgatgggcagtatgcacaccgggctggaggaatacccggacggtgccgagcggctggcagcgttttatgccgaacgcgcccgtcacggcgtggcgctgattgtcagcggcggcattgcaccagatttaacaggcgttggcatggaaggtggcgcaatgctcaacgacgccagccagatcccacaccatcgcaccattaccgaagcggtacatcaggaaggcggcaaaatagccctgcaaattttgcataccgggcgctacagctaccaaccgcatctggtcgccccgtccgcattgcaggcccccatcaaccgtttcgtgccccatgagttaagccatgaagagatcctgcaactgatcgacaatttcgcccgctgcgcgcaactggcgcgggaggcaggatacgacggtgtagaggtgatgggttccgaagggtatttgatcaacgaatttctgacgctgcgcaccaatcagcgtagtgaccagtggggcggcgattaccgcaaccggatgcgatttgccgtagaagtagtgcgtgcggtgcgcgaacgcgtcggcaacgacttcattattatctaccgactgagcatgctcgacctggtcgaagacggcgggacttttgccgaaacggtagagctggcgcaggccattgaagcggcgggcgcgaccattatcaacaccggcattggctggcatgaagcacgtattccgaccattgccacgcccgtgccgcgcggcgcatttagctgggtcacgcgcaaactgaaaggccacgtcagcctgccgctggtaaccaccaaccggattaacgatccgcaggttgccgacgatattctcagccgcggcgatgccgatatggtaagcatggcgcgaccgtttcttgctgatgcggagctgctgagtaaagcgcaaagcggacgagccgatgagatcaacacttgtattggctgcaatcaggcctgtctcgatcaaatcttcgttggcaaagtcaccagctgcctggtgaatcctcgcgcctgccacgaaaccaaaatgccaatccttcccgccgtgcagaaaaaaaatctggcggtggtcggtgcgggacctgctgggctggcgtttgccattaacgcggcggcgcgtgggcatcaggtaacattgtttgacgctcatagcgagattggcgggcagtttaatatcgccaaacagatccccggcaaagaggagttttacgaaacgctgcgctattaccgccggatgatcgaagtgacgggcgtgacgctaaaactcaatcacaccgtgacggcggatcagttacaggctttcgatgaaacgatcctcgccagtgggatcgtgccgcgcactccgcccatcgacgggatcgatcatccgaaggtattgagttatctcgatgtactgcgcgacaaagcgccggttggcaacaaagttgccatcatcggttgtggcgggattggttttgatacggcgatgtatttaagtcagccgggcgaatccaccagccagaatatcgccgggttctgtaatgaatgggggatcgacagtagcctacaacaggctggtggcttaagcccgcagggaatgcagatcccccgtagcccacggcagattgtgatgctccagcgcaaagccagcaaaccaggacaggggttaggcaaaaccaccggctggatccatcgcaccaccctgctcagccggggtgtgaaaatgatcccaggcgtaagttatcagaagattgacgatgacgggctgcatgtggtgatcaacggcgaaacgcaggtattagcagtggacaatgtggtgatctgcgcagggcaagagccaaaccgcgcgctggcgcaaccgctgattgatagcgggaaaacggtgcatttaattggcggctgcgatgtggctatggagctggacgcacgacgggcaattgcccagggaacacggctggcgctggagatttaaatcgttatttgaagcgccggatgcaacgcatccggcacgtcgcgttaatcaataaacaaggcgggagaaatgccgaatcgcgttgccaattttttagcgtgttccagcgttaatttcctcttcccgctcaaaacgcgactcaccatagatttactgccaatttccggcagatcggaaagggttaaaccatattgatccataagggtacgaatcacggctataccgccaggcatggcttgagccatggcattaaattccgcaaattcgggcgcactttcttcccacgcggttattttggcacacaccagatccagcaaggggttttcaggatcgttgagcagcagatgatctaccagttccagcgcctgggtgtattgttcctcgttctgaatacccgccagaaaaggtgccacagcagttagcttttctcctgcttgcaagatgtcggcaatcgcaatcattttttccccttagtacgatgaacagcggtaaagaaatcgtattctttatgcgtcataacttcacgtatgtagcacttttggctttcaaaaaagaccattgctacaacacgtaattcattgcccccaacattgaaaacataatgcttatccagatatttgaagttatccagagatgggaatactgcttttaaactctcaggttttttgaaatatcccttagcaatcgtgttccccagagccaccaactccgttttatgttgcgggtatttttccgcagcatctttcaatgctttttgagttatcaggtgcattcttcatcacgtccgttgacaaattggcaatatgataacatccgttgccagattggcaacggatgaatttatctgtgtgacggaagaataaacgtagaaaaacgctaaacaagagaatgtagacgatggtgacagggattttttgttttatggaagcgcgattccagaactgggcagacattgccggatgcgacgcttgccgcgtcttatccggcctggagtaacgtgctgaacgtaggccggataaggcgtttacgccgcatccggcaggtaactcccaatcttaccgacgacgtcccagcttcaccgctttcagtaccacaaatttattattcgtcgcaatagtggtgcagttgccgaaaatcttcttcagtttatggaagtaatccaggtgacggttggcaacgatatacagctcgccgttgattttcaggcagcggcgggcgtggtggaacatctcccaggcgacgttatcggtcagcgcatgttgttggtgaaacggcgggttgcagagcacagcattaaagcggaaaggctccacgccggagagcgcgttgttgatcataaactcgcagcgatccaacgcctctggcatgttggtttcaacgttcaaacggctggaagcaaccgccatcgggctttcatcgacaaacaccactttcgcctgcgggtttttatcaagcagcgtcagaccaataacgccattaccgcaaccgagatcgacaatctccccttcgagattctctggcagatgttgcataaagaagcgcgcgccgatatcaagcccggtgcgggagaagacattcgcatggttgtggatagtccagtcagtaccttccagcttccagctaacggtctgcggcgcatcggccagctgcggttcattgaaagtgcaattaatcaggcgcgcttttttccatgccagcgtggtggtggttgggccgagcactttttcgaacagttccagcgtggaagtgtgaatgtcacgggccttggcaccggcaataatacgtgtatcgctcgtgaccactttgcgcagcgcacgcagttgctgttccagcaatgccagtgttttcggcactttgatcagcaccacacccggctgttgcgggtagtcggcggtgctgtcgagaaacttcacgctgctctcatcaatcccgttgaggcgtaaattctcgcgcgtcgccagttcactgatgtaactgtcgccaatgctgtacggcttatgttccgccagtgcgcagcttaacgcaccaaaggcatcattcaggatcaacaccgggccgcggatttctgtgtcgtccaactgttgcagcaaatattcatccgccgcttcccacgcctgtagcgggttaacgtcatccgtcgccggaaaacgttgtagtgtcagactacggaaaccgttgtctaagtggctcatcggccctcctgaatgataaaatttcgacattgcccctgaaaagggtgcgtgagtataccctttttctctttttcgtgggcggttatgagcaatcttacttatcttcagggttatcccgagcagctactttcccaggtgcgaacactgattaacgaacagcgtctgggcgatgtgctggcaaaacgctatccgggaacacacgactacgccaccgataaagccctctggcaatatactcaggatctgaaaaatcagtttctgcgtaatgccccgccgatcaataaagtgatgtatgacaataagatccatgtgctaaaaaacgcgctcgggttacataccgctgtttctcgtgtgcagggcggcaagctgaaagcaaaggtggagatccgcgtcgctaccgtgtttcgcaacgcgccggaaccgtttttgcgcatgatcgtggtgcacgagctggcgcacctgaaggagaaagagcataacaaagcgttttaccagttgtgttgtcatatggaaccccagtaccaccagcttgagttcgacacccgactgtggctaacgcagttgagccttgggcagaacaaaatctgaaaatgatgtcaggcgttatcttttctttctttagcgcctaaaatcgacctcccccctttcgttaaggataacgaccatgctgcgcgcatttgcccgccttcttctccgtatttgtttttctcgccggactctaaagattgcctgcttactgttacttgtggcaggagcgaccatccttatcgccgatcgcgtaatggtcaacgccagcaaacagctgacctggagcgatgtcaacgccgttccggcgcgtaacgtgggtttattgctgggggcgaggccgggtaatcgctactttacccgacgtattgataccgcagcagcgttgtaccacgccggaaaagtgaaatggctgctggtaagtggcgataacggacgtaaaaattacgatgaagcaagtggtatgcagcaggctttgatcgctaaaggcgtaccagcaaaagtgatcttctgcgactatgccggattcagtacgctggatagcgtagtgcgtgccaaaaaggtttttggtgaaaaccatatcaccattatcagccaagaatttcataatcaacgcgccatctggctggcaaaacagtacggcatcgacgctatcggttttaacgcgccagacctcaatatgaagcacggtttttatactcaactgcgggagaaactcgctcgtgtcagcgccgtgattgacgccaaaatcctccatcgccagccgaaatatctcgggcctagcgtcatgattgggccgtttagtgagcatggctgtccggcgcagaaataatgcgtatctgcgcacgtcgaagatgaaaaaggcgtgctacattgacgacagaatccctttatggagtatccacgcgttatgatacgtttcgctgtgattggtacgaactggatcactcgccagttcgtcgaggccgcccatgagagcggtaaatacaagttaaccgccgtatattcccgcagccttgaacaggcccagcacttcgccaatgatttttctgtcgagcatctgtttaccagcctggaagcgatggcggaaagcgatgccattgacgcggtgtatattgccagcccgaattccctgcatttttcccagacacaacttttccttagccataaaattaatgtgatttgcgagaaaccgctggcgagcaatctggcggaagtggatgccgccattgcctgtgcgcgggaaaatcaggtggtgctgtttgaggcatttaaaaccgcctgcctgccgaactttcatttgttgcgccaggcgctgccgaaagtcggcaaactgcggaaagtctttttcaactattgccagtattccagccggtatcaacgttacctggatggtgagaatcccaacacctttaatccggcattctctaacggtagtattatggatatcggtttttactgtctggcgagcgcggtggcgttatttggtgagccgaaaagcgtgcaggcaaccgccagtttgctggcaagcggcgttgacgcccagggcgtggtggtgatggattacggtgatttcagcgtcaccttgcagcacagtaaagtcagtgattctgtcctggcgagcgagattcagggcgaagcaggaagcctggtgattgaaaaactgtctgaatgccagaaagtgtgcttcgtgccgcgtggcagccaaatgcaggatctcacccagccgcagcatattaataccatgctctacgaagcagagctgttcgctaccctggtggatgagcatctggtggatcatccagggctggcggtcagtcgcatcaccgccaaactgctgaccgagatccgccgccagactggggtgatttttccggcagatagcgtaaaactataattgccaaagtaaaacagtgtaaaaggtatgtaacagaccattgactggctgaatggtctgtcatactttgttacctgcaaaggggagtaacttcattgccggtcgatcgtcattacgatgtgtgaaaaaacacatccggtcaccgggcaacccgaaaggaatacgcagacgtattccttttttgttgtaagtgagaccttgccggaaggcgaggtctatgcataaaaagcagcggctgacgtcttccgacgttggccgtttttttatgtgtaaggaacttctatgaatactgtcggcacgccgttgctatggggcggattcgctgttgttgtcgccattatgctggctatcgacctgttgttgcaggggcgtcgtggggcacatgccatgaccatgaaacaggctgcggcctggagcctggtctgggtgacgctgagcttactgtttaacgccgctttctggtggtatctggtgcaaaccgaaggtcgcgccgttgccgatccacaggcactggcctttctcacaggttatctgattgagaaaagcctggcggtcgataacgtctttgtctggctgatgttgttcagctatttctctgttccggcggcattacaacgccgcgtgctggtgtatggcgtgctcggggcgattgttctgcgtaccatcatgatcttcactggcagctggctaattagccagttcgactggatcctgtatatcttcggtgccttcctgctgtttaccggcgtgaagatggcgctcgcccatgaagatgaaagtggcattggcgacaagccgctggtgcgctggctacgcggtcatttgcgcatgaccgacaccatcgacaacgagcatttctttgtgcgtaagaatggattgctgtacgccacaccgctgatgctggtactgattctggtggaattgagcgacgtgattttcgccgtggatagcattccggctatcttcgccgtgaccactgacccgttcattgtgctgaccagtaacctgtttgcgatcctcggcctgcgtgcgatgtatttcctgctggcgggcgtagcagagcgtttcagcatgctcaaatatggcctggcggtgattctggtgtttatcggtatcaagatgctgattgtcgacttctaccatattccaatcgccgtcagcctgggcgtggtgtttggcattctggtgatgacgtttattatcaacgcctgggtgaattatcggcatgataagcagcggggtggataatttttaatctgcctaagccgtgtaccctgtcattaacatgagcaccgttttctccctctcccttccagggagagggtcggggtgagggtaatttttcgcaccgatgctggcctgttcccctcaccctaaccctctccccaaacggggcgaggggactgaccgagtccttttttgatgttgtcatcagtctggaagccgcacgttggctttatttttatgtcaaagaaatgtaaccattaagtttcaaaatatgacctctctttaaaatccagcatttttcgcttcccgaagctgtaactttccttatactcgaccttgcaaacactttgttacatcctgaaagatgcgtcgacagaacgcaccagggatgtgcgacaacacaatgaaaggatcgaaaaatgactacgcaacgtagtccggggctattccggcgtctggctcatggcagcctggtaaaacaaatcctggtcggccttgttctggggattcttctggcatggatcagtaaacccgcggcggaagctgttggtctgttaggtactttgttcgtcggcgcactgaaagccgttgcccccatcctggtgttgatgctggtgatggcatctattgctaaccaccagcacgggcagaaaaccaatatccgccctattttgttcctctatctactgggcaccttctctgctgctctggccgcagtagtcttcagctttgccttcccttctaccctgcatttatccagtagcgcgggtgatattagcccgccgagtggcattgtcgaagtgatgcgcgggctggtaatgagcatggtttccaaccccatcgacgcgctgctgaaaggtaactacatcgggattctggtgtgggcgatcggcctcggcttcgcactgcgtcacggtaacgagaccaccaaaaacctggttaacgatatgagcaatgccgttacctttatggtgaaactggtcattcgcttcgcaccgattggtatttttgggctggtttcttctaccctggcaaccaccggtttctccacactgtggggctacgcgcaactgctggtcgtgctggttggctgtatgttactggtggcgctggtggttaacccattgctggtgtggtggaaaattcgtcgtaacccgttcccgctggtgctgctgtgcctgcgcgaaagcggtgtgtatgccttcttcacccgcagctctgcagcgaacattccggtgaatatggcgctgtgtgaaaagctgaatctggatcgcgatacctattccgtttctattccgctgggagccaccatcaatatggcgggcgcagcaatcactattaccgtgttgacgctggctgcggttaatacgctgggtattccggtcgatctgcccacggcgctgctgttgagcgtggtggcttctctgtgtgcctgtggcgcatccggcgtggcgggggggtctctgctgctgatcccactggcctgtaatatgttcggtattagcaacgatatcgccatgcaggtggttgccgtcggctttatcatcggcgtattgcaggactcttgcgaaaccgcgctgaactctagtactgacgtgctgttcactgcggcagcttgccaggcagaagacgatcgtctggcaaatagcgccctgcgtaattaattgtttaacccctttcgtctacggcggaaggggttttctcaactttaaacggatcaattccccttttctgcatccgccagaaacgaatgatattcaggccattcataagcagaaaactaccctcaatcatcgtgccgcctatgctccccgcccagaagttgtgaatcacccagcaacacgtactaaaccacattacgcagcgcatggtcagccctttacagcagaatagcgcccaggtactgacaatcgtgccgataaccggcaatagttcgacaggatgatggaacttcgcgaggccaattccgccagtcagcacaataaaaatcgccattacccataagctgcgcgtgcgtaaggtaatcaatgtacgaatggcattaaggatggcactggcaccagcgggataggtgcccagaagaaaaaaatgtacgccaataacggcgctatagacgctaagctgctttttgaagcgacgttcgtcacgattgaaaaatgttgtgataccaatcagaaaggcgatgacacccacgccctgggccagccaatacgcggtcatgataaatccttagcaggtatggaaaagcaaacggcgcttcacattatgaaacgccgttttttattaacaactcatttcgactttatagcgttacgccgcttttgaagatcgccagttcgcggaagtcgttacgctcgttacaggtttgcttaccgttggcaaactcaacgatggtgtcgataaattcttccagcaactgcggcatcgctttaccgtggatcaactgacccgcgtcaaagtcgatccagtgttttttcttcgccgccagttcactgttggtggcgattttcaccgtcggcacaaatccaccatacggcgtgccacgaccagtactgaacagcaccatatggcagcccgcacccgccagggcgctggtcgctacggcatcgttacccggcgcacttaacaagttcagccctggcgttttcagacgctcgccgtaacgcagcacgtcaaccacgacgctggaacccgctttctgggtacagccaagacttttgtcttccagcgtggtgataccgcccgctttgttccccgggcttgggttttcatagatcggctgatcatgggcaataaagtactgtttgaagtcgttgaccatggtgaccagtttttcaaacgttgcttcgtcgcggcaatggtccatcagcaactgctctgcgccaaacatctccggcacttcggtcagtacggtagtaccgccgttagcaatcacgtagtcagagaaacgccccagcatcgggttagcagtaataccagaaagaccgtcagaaccaccgcactccagaccaaacttcagttcgctgagtttgcctggctcgcgtttatcgttgcgcatcacgttatacagctgatgcaaatgctcgattccggcttcgatctcatcatcctgctgttggcagatcatgaaatgaacgcgttcaggatcgatatcgcccagcgtttcacggaatgcggcaacctggttgttttcacagcccagaccaatcaccagcactgcgcctgcgttcgggtggcgcaccatgttttgcagcatggtgcgggtattaatgtgatcgtcgcccagctgactgcagccgtaggtgtggctgaagaggaacacgccgtcagtaccttcggcgttgttggtctctttcagaaaacggttctggatctgccgcgcgatgccgttgacacagcccacggttggcaggatccacagctcattacgcaccccgacatcgccgttagcgcgacgatagatctgcacttcacgatctgccgcttgcgcaggcagatcctgaaaatcaggttgatagcgatactgatccagatcgctcagattcgtgcgcgtattgtgggcgtgaacgtgaacacctgccgcaatatccgccaatgcataaccaatcggcaggccatatttgatgacattggccccttttgcgatatccgttaacgcaaatttatgtccacgagcaacatcctggcgcagcgtaacagtctggttatcgacactgacttctgtgccttcagccaaatctgctaaagcgaccgcgacgttatccagcgcatggatcttgatgtattgcatatcaaccccagaccttagttcagttcaatggcgaagtagtcacgcgcattgttaaagcaaatatttttcaccatctcgcccagcaggttgatgtccgccggtgcttcgcccgcttccacccagcgaccgatcatctggcacagaatgcggcggaagtattcgtgacgggtgtaactcaggaagctacggctgtcagtcagcataccgacaaagcggctcagcagaccgagctgcgccagttgggtcatctgacgttccataccgtctttctgatcgttaaaccaccagccggaaccgaactgcattttgcccggcataccttcgccctggaagttaccgatcatggtgcccagcacttcgttatcgcgcgggttcaggcagtacagaatggttttcggcagcaggttttcttcattctgcttgctcagcaacttagacagctcttccgccatcggacggtcgttgatggagtcaaagcctacatccggccccagcagtttgaactgacgcaggttgttattacgcagcgcgccaatgtggtactgctgtacccagccgcgacgtgcatattcggcaccaaggaacaccagtaccgcagttttgaactgcgccacttcgtgctcgctcagggtttcgccagccagacggcgcgccagaatgctgtccagttccgcttcgttcgcttcagcaaacatcaccacatccagcgcgtggtcagacactttacagccgtgagcggcgaagtgatccagacgtttggtcagggcagtttgcaggtcagcaaagcggcgaatgtcggtatcggaaacttcgcccagcttcgccatgtagtcgttaaaggtcgcctgttcgatgttgaaggctttgtccggacgccagctcggcagcactttgatggtgaaagagccgtctttggcgatctctgcgtgatgctccagagaatcgatcgggtcatcggtggtgccgaccattttcacgttcatctgctgcatgatgccgcgcgcggagaagttatcctgcgccagcagttcgttacattcgttccagatttcatcggcagtactcggagaaagcaatttgccagtgataccaaacggacggcgcagttcgaggtgcgtccagtggtataacgggttgccgatagtgtgcggaacagtcgccgcccaggcgtcaaatttttcacggtcagacgcatcaccggtacacagacgctcggccacaccgttggtacgcatagcgcgccatttgtagtgatcgcctttcagccagatgtcatacaggtttttaaaacgatagtcttccgcaatctgctgcggcggcaaatggcaatggtaatcgaaaatcggctggtcttttgcgtagtcgtgatacagacggcgggcaaattcggtatctaacaggaaatcttcagtcataaacggagtcattttcgtcttcctctcaacgagtgagctagcttgcttatggtgcgatgctgacaaagttatcacaccaatttccagagtccgaagatattttcgtgagttagatcaataaacgtagttaaaaaaattactctcaaagtggtaaatctcgctgcaggccgcgccagtactggccttgctgtcgtcaggtaatgtccctacaaatattcccacatttgtgatggctctcaccttttaaagttgtatgacaagttatctttctgccgtcgcaaatcataagtcgacggaatgcaaattgccgattcattcatttgttagatgaatcgggttaaccggtacggaagccgaattagcacgaaactttcatggcaacgttcggggcgtgccggttttttttcggttacccggtcgtaactaacatcttcagcctctggcgggatgatggccgcgcttcctgcggatataacaaaacgatgaggttttacatgcgtaaaattaaagggttacgttggtatatgatcgcactggtgacgctcggcaccgtgcttggttacctgacgcgtaacactgtggcggcagctgcgccaactctgatggaagagttaaacatctccacccaacagtattcctatatcatcgcagcctattctgctgcttatacggtcatgcaaccggtagcaggttatgtactggatgtgctgggtacgaaaatcggttatgcaatgtttgctgtgctgtgggccgtgttctgtggtgcaaccgcgctggcaggtagctggggtggcctggctgttgctcgtggtgcggtcggtgccgcggaagcagcgatgatcccggcgggtctgaaagccagctccgaatggttcccggcgaaagagcgttccatcgcagtaggctactttaacgtaggttctagcattggtgcgatgattgcgccgccgctggtggtatgggcaatcgtaatgcacagctggcagatggcatttatcatctccggtgcattgagctttatctgggcgatggcatggctgattttctataaacatccgcgcgaccagaagcatctgaccgatgaagaacgcgactatattattaatggtcaggaagcccagcaccaggtgagcacggcgaagaaaatgtccgttggtcagatcctgcgtaaccgtcagttctggggtatcgcgctgccgcgtttcctggcagaaccggcctggggtacttttaacgcgtggatcccgctgttcatgtttaaagtttacggctttaacctgaaagagatcgcgatgttcgcctggatgccgatgctgtttgctgacctcggttgtatcctcggtggttacctgccgccgctgttccagcgttggtttggtgtgaacctgatcgtttcccgtaagatggtcgtaacgctgggtgcagtgctgatgattggcccgggtatgatcggcctgttcaccaacccgtatgtcgcaattatgctgctgtgtatcggtggttttgcccaccaggcactgtctggcgcgctgattacgctctcttccgatgtgtttggtcgtaacgaagtggcaacggcaaacggtttaaccgggatgtccgcatggctggcaagtacgctgtttgcgctggttgtcggtgcactggctgacaccatcggcttcagcccgctgttcgcagttctggcagtgttcgacctgttaggtgcgctggttatctggaccgtgttgcagaacaaaccggcgattgaggtggcgcaggaaacacataacgatcccgcaccgcaacattaacgtttcgtgtaagttttagtttcccttcaaagccgccttctcaggcggctttttcatcactgcgagtagagctaaactcgcaaaagtggtataacaaatatagtctgccgtatcatgcctggagcgcatatggaaatcactgaaccacgccgtttgtatcaacaacttgccgctgacctgaaagagcgcatcgaacagggcgtctatctggtgggtgataaactgcctgcagaacgctttattgccgatgaaaagaacgtcagccgtacggtagttcgtgaagccatcatcatgctggaagttgaaggctatgtcgaagtgcgtaaaggtagtggtattcatgtggtttccaaccagccgcgccatcagcaggcggctgacaataatatggaattcgccaattacggtccgtttgagttgcttcaggctcgccagctcatcgaaagtaatattgccgaattcgcggcaactcaggtaacgaaacaggacatcatgaaactgatggccattcaggaacaggcgcgcggcgaacaatgcttccgtgattccgagtgggatttgcagttccacattcaggtcgctctggcgacgcagaactccgccctggcggctatcgtggaaaaaatgtggacccagcgtagtcataacccgtactggaaaaaactgcacgaacacattgattcccgtaccgtcgataactggtgtgatgaccacgatcaaatcctcaaggcgctgattcgcaaagatcctcatgctgctaagctggcaatgtggcagcatctggaaaacaccaagatcatgttatttaacgaaaccagcgacgacttcgagttcaatgccgaccgctatctattcgccgaaaacccggtggtgcatctcgatacagccaccagcggcagtaaatgaaattcctgtccgacaggcgctgcaatgcgcctgtttgtctcgtcggtaagcgaaaagtataaagtgtcagcctgtgtaaatcctctcgccaccctcccctgcattcagcaaaatcagactccacggacatgtaattttgataacgaacaacgttgacctttgttacaattagattcaatttgaatttatgtttttgaatgctttcttatctcacgatttaacagggaatagttcaggctgtgttgatgtatcaaacccgcagaacataccaaaacagcaataacattgcggtagtgcatcttttaaaaccagcgtggcgttaaccgattcaccaggaataatgaatggaacttttgacccaattgctgcaagccctgtgggcgcaggattttgaaaccctggccaatccaagcatgattggcatgttgtattttgtcttgtttgtaattttgttccttgaaaacggcttgcttccggcggcctttttaccgggcgacagtttactggtattggtcggcgtgttgattgcgaaaggcgcgatgggctatccgcaaacgattctgctgctgaccgttgccgccagcctcggctgctgggtcagctatattcaggggcgatggctgggcaatacccgcaccgtacaaaactggctatctcatttacccgcgcattatcatcaacgcgcacaccatctttttcataaacacggtttaagcgcgctgttaattggtcgctttattgcgtttgtcagaacactgctgccgacgattgccgggttaagtgggctgaataacgcgcgctttcagtttttcaactggatgagcggtctgctgtgggtattgatcctgacaactctgggttacatgctcggcaaaacgccggtatttttaaagtacgaggaccagctgatgagttgcctgatgctgctcccggtggtgctgctggtgtttggcctggcaggttctctggtcgtgttatggaaaaagaaatatggaaatcgggggtaagggatgcaaatacctcgcatgagccttcgccagctagcctggtccggcgctgttttacttctggtcggcacgctgttgctggcctggtccgcggttcgccagcaagagtctacgctggcgattcgtgccgttcatcaaggcacaacgatgccagacggttttagtatctggcatcaccttgacgctcatggcattcctttcaaaagtatcacccccaaaaacgacactctgttaattacatttgactccagcgaccagagcgccgccgcaaaagcggtcctcgacagaacattgccccatggctacatcattgcgcagcaggacaataacagtcaggctatgcagtggctgacccggttacgggataactctcatcgcttcggataacttcctgttatccgaaacatatcactcactttggtgatttcaccgtaactgtctatgattaatgaggcggtggttaacactaccgcttcgttgtctggacaatcgttcctttgtaataggtccgaatcacaatggaaggttcaagaatgaaataccgcatcgctttagctgtttctctctttgctcttagtgccggtagttatgccactaccctgtgtcaggaaaaggagcaaaatatccttaaggagatcagctatgccgaaaaacaccaaaaccagaatcgtattgacggtctgaataaagccctgagtgaagtccgggccaactgtagtgatagccagctgcgtgccgatcatcagaagaaaatcgcaaagcagaaagatgaggtggcggaacgccagcaagatttagccgaggcgaagcaaaaaggcgatgccgataagattgccaaacgcgaacggaaactggcagaagcgcaggaagagctgaaaaagctggaagcgcgcgactactaactcacaatagtcactacttactcacctggagaaaactatgagcaaagaacacactacggaacatctgcgtgctgagttgaaatccctttccgatacgctggaagaggtgcttagcagttctggcgagaagagcaaagaagagttgagtaagattcgtagcaaagcggagcaggcactgaaacagagccgttatcgcctgggtgaaaccggtgatgccattgccaaacaaacccgtgtcgcggcggcgcgtgccgatgagtatgtgcgcgaaaatccgtggacgggcgtgggcattggcgctgcaatcggtgtagtgctcggcgttctgctgagccgtcgttaattatggcggacactcatcacgcacaagggcccggtaaaagcgttctgggcatcgggcagcgaattgtttctatcatggttgaaatggtagagacacgtctgcggctggcggtggtggagctggaagaggaaaaagcgaatctctttcaacttttactgatgctgggcctgacgatgcttttcgctgcatttggtcttatgagcctgatggtgctaattatttgggcggttgacccgcaatatcgcctgaatgcgatgattgccaccaccgtggtgttgctgctactggcactgattggcggtatctggacgctacgtaaaagccgtaagtctacgttgctgcgccatacacgccatgagttagcaaacgatcggcagctgctcgaggaggagtcccgtgagcagtaaagtcgaacgtgaacgacgtaaggcgcaactgcttagccagatccagcaacaacggctggatctttccgccagtcgtcgtgaatggctggagacaacaggcgcttacgatcgtcgctggaatatgctgctaagtctgcgctcctgggcgctggttggcagtagcgtgatggcgatctggacgattcgccatcctaatatgctggtccgctgggccagacgcggttttggcgtatggagcgcctggcgtctggttaaaacgaccctcaagcagcaacagcttcgcggttaacttccctctggccggagccattccggccttatccctcaaattttttgaagatttttgacagttttccttgctaacaatcatcattcaccacgtttatgattctctccatcgacagcaacgacgctaataccgcgccattgcacaaaaaaacaatcagcagcctgagtggcgcagtggagagtatgatgaaaaaattagaagatgttggtgtactggtagcgcgcattttaatgccgattctgtttattaccgctggctggggaaaaattactggctacgcgggtacccaacaatatatggaagcaatgggcgtcccgggttttatgctgccactggtgattctgcttgagtttggtggtggtctggcaatcctgttcggtttcctgactcgcaccacagccctgtttactgcgggctttacgctgctgacggcatttttatttcacagcaactttgctgaaggcgtcaacagcctgatgttcatgaaaaacctgacaatttctggcggattcctgctgctggcaattaccggtccgggcgcgtatagcatcgaccgcctgctgaataaaaagtggtaagcacgcgctatacttaacgataaaaaacgaggaggaagctcctcgtttttgctattggaggagagaaaaatgggtcaactgattgacggcgtctggcatgacacctggtacgataccaaatctaccggcggtaaatttcaacgtagtgcttccgcatttcgtaactggctcactgccgatggcgctcctggccccactggcacaggcggttttatcgcagagaaagatcgttatcatctctatgttagtctcgcctgcccgtgggcgcaccgcacgctgatcatgcgcaaactcaaaggactggaaccgtttatttccgtttccgtagtgaacccgctgatgctggaaaacggttggacctttgatgacagttttccgggagcaaccggagacacgctctatcaaaatgaatttctgtatcagctttatctccacgccgatccacactacagcggacgagttactgttcccgtgctgtgggacaaaaagaaccacaccatcgtcagcaacgaaagtgcagaaatcatccgcatgttcaataccgcgtttgatgcgctgggcgcgaaagcgggtgattactaccctccagccctgcaaacaaaaattgacgaacttaacggctggatttatgacaccgttaacaacggcgtgtataaagctggttttgccaccagccaggaagcttacgacgaggcggtggcgaaagtgtttgaaagcctggcacgactggagcagattttaggccagcatcgttacctgaccggcaaccagctaaccgaagccgatattcgcctgtggactacgctggtgcgttttgatccggtgtatgtgacccacttcaagtgtgataagcaccgcatcagcgattacctgaatctgtacggttttctgcgcgatatctaccagatgccggggatcgccgaaacagtcaatttcgatcatatccgtaatcattacttccgcagccataagaccatcaaccctacggggattattagtattggtccgtggcaggatctcgatgaaccgcatggacgagatgttcgcttcggttaaaaaaaggcaccttacgaggtgcctctgataattagctaagtgcatgttgttcatgtcggatgtggcatgaacgccttatctgacatacaaaacattgtacattcaatagattgcataacccgcgcagaccagataagcgtagcgcatctggcgattttgcgcttgtcatcagtcttagcgcgccttcacggcactttattaattccttgaacgaatatttactgccatttcattcacgtctattcttaatttgctgctttaaaaacaagtgattgagcaaaattgaggcaaaaatggactggtatctgaaagtactaaaaaattatgtcggtttccggggtcgtgcgcggcgcaaagagtactggatgtttattctggtcaacatcatctttacgttcgtgctggggctgctggataaaatgttaggctggcaacgcgctggtggcgaaggcatcctgacgacaatctacggtattctggtgtttttaccgtggtgggcggttcagttccgccgcctgcacgacaccgaccgcagcgcgtggtgggcactgctattcttaatcccgtttatcggctggcttattatcatcgtctttaactgccaggcgggtacgccaggcgaaaaccgctttggaccagatccaaaactggaaccttaaaacaaatctgctcgccggatgtctgactcatccggcttttatcattatgttgatgaatgaataatttactaatgtttatttaaaatatttcaatgtcgttatataaattacctataaaaaataaccatgtatttatcttaaatatcaaaacctttataacatccgaaaaagaaagatacgaatagcatttacacaatacccggaatagactttcgtcacttttaattaaagggatgtttttatgcagtggtatttgtccgtattaaaaaattatgttggtttctctggtcgcgcacgtcgtaaagagtactggatgtttactctgattaacgccatcgtcggcgctattatcaatgtcattcaattgattttaggtctggagcttccatatctgtctatgctttatttgctggcaaccttccttcccgtccttgcgcttgctatccgtcgcttacacgataccgaccgtagtggtgcctgggccttgctcttttttgttccgtttattggctggctcgtgcttctggtttttttctgcacagaaggtacttctggcagcaatcgttacggaaacgatccgaagtttggtagtaattaatcttagaattggggcgatatttcgcccctttttattaacaataataaatattattttccgttaaaaagtttgggaatttcccgcagacaccaggatttcgcttcccccatactgtcacgacgccaggccataataatatcgatctcgctggtgctttccgggctgacgacacgcaaccgcccttccgcaatatctttttcgaccataggatacggcatcgtcgccacgccaagccccgccagtaatgcctgacgtttatcttcaatcgtgctcaccgttaagcgcggctgtttgtccagcagctgtacggtcaacaccgggcgctcacgagcggtatccgccaccgcaattccacgatatttcacacgcgtcacttcagataacggttccggctcctgatgaatcgggtgatcaggcgcggcaacgtagacgttcattaacgtatagagcttgcggctgttgatctcgctgctggaacgaaaatgcatatccggcgcgataacaatatccgcccgcccctgctccagccgttcccacgcccccgccagcacttctgtgatgattgccagttgggtattggcttttgccgccagtttgtcgattaacgggaaaaaggcaggtgtcggtaccagcgcttcggtcacaatggtgagatgcgtttcccaaccgcgcgcgagagcttccgcatcagtagtcagtttatctgcggcttccagcaaaacgcgccctcgctccaacaacatcctcccgacattggtgaatttggtacgatggccgctgcggtcaaacagcaccacatccagctcttcttccagtttttgcatggtgtagctaagtgcggaaggcacgcgtcccagctcatccgccgccgccgcaaaactgccccggcgatcgatcgcatccataacccgtagtgcttccagcgttaatgccctttctttggccatttcgttctcattcaggaaatttgaacataccgggcagaatatctggctaacaatgtagcgtccagccccttaccataaaaggaagtaaagagaggtcaagaattatgattactacccgaactgccaggcagtgtggacaagcagactacggatggttgcaggcccggtatactttttcctttggacactacttcgacccgaaattgttaggctatgcctccctgcgtgtgcttaaccaggaagtgctggccccaggtgccgcctttcagccgcgaacctatcccaaagtcgatattttaaatgtgattctggatggagaagcagagtatcgcgatagcgaaggcaatcatgttcaggccagcgccggagaggcgttgctgctctctacccagccgggtgtcagctatagcgaacacaatctcagcaaagacaaaccgttaacgcgaatgcagctttggctggacgcctgcccgcagcgagagaatccgctgattcaaaagctggcgcttaatatgggcaagcagcaattaatcgccagcccagagggtgcgatgggaagcctgcaattacgccagcaagtgtggctgcaccatatcgtgctcgacaaaggcgaaagtgcgaatttccagttgcatgggccacgcgcgtatttgcaaagcattcacgggaaatttcatgcgcttacgcatcatgaagagaaagcggcgctgacctgcggtgatggggcgtttattcgtgacgaggctaacattacgctggttgccgattccccactgcgcgctttgctgatagatttgcctgtctaattgtttttacagggagatgatgatgagtaaaaaattggccaaaaagcgccagccggtgaagcccgtggtggcgaaagaacctgctcgcaccgccaaaaattttggctatgaagagatgttgagcgagctggaagctatcgtcgcggatgctgaaacgcgtttagccgaggatgaagctaccgcgtaaagacaggttgccggatgcggcgaaaacgccttatccggcctacaaaatccaacaacattaacgaattaaacaacccgtaggccggacaagatgcgccagcatcgcatccggcacgatccccaaaacctggcgtttatctggccttgctcgccataatctcgataatctgccgatccgtttgctgcatgctatggcttgctaacgcacacaggttggcaatgctctgctcaacatcatgcgccacaatcccttcattgccggtcacggcggtatcatccagcgccattaacaccgctttccacgcagcgctagcactggtgctaaccttcatcgcgcagctgttgctcgcaccatcgcaaatcatgccgctgacatcgccgatcatactgctgatcgccatgctgatggtttcataacgcccatccaccagccatgccatcccggcggcggcccccattgctgcggtcgttgcggcacacagcgcagacaaacgcggtaactggttatggatgtaaattgcgctcaaatggctaagcatcagcgcacgcgccagccgttcatcatccgctccgaagtgttctgctaccaccaccacaggcattgttgcggtaatcccctggttaccgctgccggagttactcatagccggaagcgtagcgccgcccatacgcgcatcggatgccgcgctggtacgaatcacaatggaactagagagatctttcgccagcaaaccgcgctcgcactgtttttccagcgtcgcgccaatatgcagcccccacttaccgctcaaaccttcctggcttaacgcacaatttagcttcgcggaatcgagaataaagcggatcgccgcaaacgggacttcattgacgaacttcaggatctcagccagcgtcgttctggaaagcaccgtcagcggagactcttgctcgccctctgccacacacgcctgctgggtaaacaccacaccatcgtgcgtctcgatatgcacaatgttggtatgcccgccgacgatggtgacacacgcccacttctcaccgttccagactttggcgcgactgaagaggatttcatcgcaaggttcctggatcttaacggagactttccccgccgccagcagtgctttggcatcggcaattgcctgcgctgttgcgtctttcagcacttccagcccggcgttggcatttccacctaacgcccccagcgccgccgcaatcggcagccccaccattcccgtgccgggaacggtgacgcccagaccgttcttcatcagatttgggctaacccaggcttctacacgttcaaccggaccttccagttctgccgcagcaaccgccgccgccagcgccagactaatcggttcagtacatcccagcgccggttttacttcctcctgaacggcgaggatgtaacgctgccataacggatttaaagtgctatcaaacatattaaaaaccttaaaatttcaggtaaatcaagaaaatgccaggaacggagaaacacacagcaacaaaccagtgacgataatcaggtacagagacatccctttgtatttgtgcaatgctggtactttgtaaaccagccacgccgggatcaggcaccctaccatgccgaaaatcgggctacagatagaggtgaagctcaacaccggtgcgttcagtacgatggcgctccaggccagcaaaatggcgaaaatcatgatgccgcgctgaacgagattttcgttaatcttctcggcaggcatcttgcgacgcaggatgttcattacgatcccttgcgttgcttcgcgaaagcctaaatagacgccaaagaatgcagtcatgacagcaaagatattgagaatgacgctgaccactttcacccacgctgcgccgtcaccgctaataaactgtgcggcaatcgccagcgcggaaatattctgctcataggcttttaccgcttcgtcatgtcccatcgccagcgtgaagctcacggcgtagaaaaagacggtgacaaacaaaatgccaaacgcgatattcattgcccgcaatgctttatgccgcgccacttcaatacttttttcccggctgcgataagagatcaccatcggacttaacgtctggataaacagaatgctcgtcagggtaaacggcagcgtaataatggcgtttttcaccagcagccccagcggcggtaggctaccgacgttatacagatgccacattcccaccatgctcacgcccagcgccgcgaccaccagcagcttggtcagcaccatgccggtgctaattttgaataacaatttctcgccgcgactggagatcgccaccagaatgcaaatcagtaccagaccataaaagggactgtcactcagcaacccttccgtcacgccgaaggtatgcaggtaggaagcactatcgttggtgatggcggtggaatagacgaacatccaaatcaccagcattacgaaatagagcgcacctaacaggatgccccagtttttacctaaataaccgctaatgacgctcgggtaatctttacattctggactttctgccagcgtattaataaacaatcgctgaaacagatacattgccgggtaaccaatcacgctactgagcaaaaatacccacaatcccatcaaaccgacctgcaccgggagaaaaacaatccccgcgccaatcgccatcccgatactcataatcacccagccggtgtcagtactgtcgaatttgatcgcttctcgccactcgctctcactcattccagcacgacccgccggggtcgaagcgtctgcaatgacgcctttattcgatgcaatttccataatttctcgctcaatattttgtagggcttattatttttttccgagccgcatcaaggcgatatgcggtctacgtttttgcaggcgagttattagaataaagaaatgatacgcgcgaggtcagagaaaatcttcacaatcaagactttgaaataacggagatggataagaattttctactaaattaatcgcaggagaatattcattctctatttgcggcagatcacaaaaaaaaggtgcacatttgtgcacccaaggatgaaagctgacagcaatgtcagccgcagaccactttaatggccagtcctccgcgacttgtttcgcggtatttatcgttcatatctttgccggtttcatacatcgtctcgatcactttatcgagactaacacgcggtgcgctggtgcggcgcatcgccatccgcgcggcgtttactgctttcacggcattaatggcattacgttcaatgcacgggatttgtacctgtccggcaaccggatcgcaggtcagcccaaggttatgctccatcgcgatttccgccgcattgcatacctgcgccggactgccgcccagtagttcagttaaccctgccgccgccatactacaggccacgccaatctccccctgacagccgacttccgcgccagagatggaggcgttcattttatacagcgcgccaatagcccccgcggccagaaaatagcgggcaatactccgctcgtttaccggacgacggaacttatcgtaataagccagtactgccggaataatgccgcacgcaccgttagtcggtgccgttaccacgcgcccgccagctgcgttttcttcactaaccgccagcgcgtacatgttgatccagtcgatgacattcatcggatcgttagagatgttatcgctggaaaccagctgacgacgcagcgctacggcacggcgcggcacattgagcggaccaggcagcacgccttcagtgttcatcccacgttcaataccgtcatgcatcacttgccagatacgggcaaaaccggcgtcaatttccgctttgctgcgcagcgctagctcgttgtgcatcatcagaccagatatagacaggccgttgtaatcacacattttcagcagttcacctgcactgtggaaatcgtaaggtacggacgtttcgacatcgtggctcaggccgaagtgttcttcttcgacaataaacccgccgccgacagagtaataggttttacttaatagctcttcctgtcccttccaggcagtgatccgcattccgttctcatggcgaggcaacatttcgggatggaagataatgttctttgctacaggaaaatcaacaatatgcgcaccagatgccactggcagccgcccgctgcgcgttactaactctataaatgcagggatctcatcaatgacaacatcctgcggactgtttcctgccagtcccatgatgatggcgacatccgtggcatggcctttgcccgtcagactcaagctcccgtacagatcgaccacaatatggctcgtcgcggttaataagccgctactttccagccgatcaataaaactttttccggcattcattggccccacggtatggctactggagggaccaatcccaattttgaaaatatcgaatgcactaatcatatccacaccctcggattgccgttcagtgaagtggagcggaacgaccttacgaccgtcccgctcacgaggctttacgcactacgtactgcgatggcttcaatttccagcttcacatctttcggcaaacgcgcgacctgcacacagctccgggtcggataggtcgcctgatgctcatcgaagaactgcttatagacttcgttgatggtggcaaaatcattcagatcggtgataaacacggtcatcttgatgatatcgcccacgctcagcccggcagcaaccacgatcgctttgacgttttcgaggcttaaacgcgcctgatcttgcacatcagccgggatctcaccggtctgtgggcaaaccggtatttgcccggaggtgaagaccatgctgcctaaatcaacgccctgaacataagggccgattgcgcctggggcacgttgcgtttcgataatctttttcatacatcctccggcgtcagagcgcctgggtaaaggtacgactaataacatcctgttgctgttcacgggtcagtgcgttgaagcgcacggcgtagccagagacacggattgtcaggttaggatatttttccgggtgctcgatggcatccagcagcatttcccgattcattacgttgacgttgaggtgttgaccgccttcgacatccgcttcgtggtggaaatacccatccagcaggccgacaaggttggttttacgtactggatcttctttgcccagcgccgcaggaacgatactgaaggtgtagctgatcccatctttggcgtaggtgaacggcagtttcgccacgctcgtcaaactggccacggcacctttgcggtcacgaccatgcatcgggttagcgcccggcgcgaacggtgttccggcgcgacgaccgtccggcgtattaccggttttctggccgtacaccacgttagaagtgatagtcagaatgctctgggtagggacggcgttgcgataggttggcagcgctttaattttcttcataaagcgttcaaccaggtcgcaggcaatgctgtctacgcgctcgtcgttgttgccgtactgcggatattcaccgtcgatttcaaagtccaccgccaggccgttttcgtcacggattggtttcacgcgggcatatttgatggcagacagggagtccgtcgccacgctcaggcccgcgatgccgcatgccatagtgcgatagacatcacgatcgtgcagcgccatcaggctagcttcgtagctgtacttgtcgtgcatgtagtgaatgatattcagcgcgctgatgtactgcaccgccagccagtccatgaagtgatcgaggctgtccatcactttgtcgtaatccagcacgtcgtccatcagcggtgctgttttcggcccgacctgaatcttcagcttctcgtccaccccgccgttaattgcgtagagcagcgttttcgccaggttagcgcgtgcaccaaagaactgcatttgcttaccaatcaccattgggctgacgcagcaggcaatcgcgtaatcgtcgctgttgaagtcagtacgcatcagatcgtcattttcatactgcaaggaagaggtgacgatgctcacctgcgcggcatattttttgaaggcaatcggtaattcttcgctccaaagaatggtcaggttaggttccggtgccggccccatagtgtgcagggtgtgcaaatagcggaaggagtttttggtcaccagcgtacgaccgtccagccccatcccgccgatcacttccgtcgcccagattgggtcgccggagaacaggctatcaaattccggtgtacgcaggaagcgtaccatacggatcttcatgatgaagtgatcgatcagttcctgtgcctgctgctcattgagtacgccagctttaaagtcgcgctcaatgtagatatcgaggaagcttgccgtgcggcccaggctcatcgcgccgccattttggcttttcactgccgccagataagcgaagtagagccactgcaccgcttcctgcgcattctgcgccgggcgagagatatcaaagccatatttcgccgccatttcctgaatctgcaacagcgcatgacgatgctctgccagctcctcacgcagacggatggtggcttccagatcctcgcctttttccagacgagactggagatcggcaaattgcagttcgcgttcacgtaccagataactgatgccatacagcgctacgcggcgatagtcaccgataatgcgcccacggccatagccatctggtaaaccggtcagcacgccagatttacggcagcgcagcatatccggactgtaaacatcaaatacgccctggttatgggttttacgcagatcggtaaacagatattcaaattcactgtccatttctcggccataggcgtggaaactacttttaatcatattaatgccaccgaacgggtgtagcgcacgtttcaacggcgcatccgtttgcaggccaacaattttttccagcggctggttaatatatcccgcatcatgagcggtaattgtggtggcaatattggtatcgaaatcaaccggcgcgtgggttgcattttcgatacggatgccttccattactttttcccacaattccgtggtggcaggcgtcgcttcggcgaggaaagattcatcgccttcatacggtgtatagttatgttgaataaaatcgcggacattaatttcgtttttccagtccgtacctttaaagccaagccatgcgtcggcgtacagcttatcgctggtatcaatatctaccttcatgaaaaataatctctctacaatacttcaactaaattatgcaaattctgcgggcgcgttaactttgcctaaatgaatggcatccaaagcaatcattttttcttcgttagtcggaataacggcacaaatgacacgcgcattttcactggaaacaattcgctcaccacaggagttagagcgattattcatttctgtatcaatctctaagcctaatacagccaaatgttccatgaccagacgacgaattaagctactattctctcctattccgccggtgaatataattccatccaggcgacgtaaactagctgcgtgtccggcaatatgacgggcaattcggtgaacaaaggttttaattgccagttgcgcgcgttcgtgaccttcatgccaggctttttccagaacacgtaaatcgctagaaagaccggaaatacctaataatccgctctctttattcactacgcgttccaggtcacccaggctctggttggtttggctggcgacccaggacatcgcaccaaagtcgacatcgccactgcgggtacccatcatcaagccttccagcggcgtcattcccatactggtatcaacactctgaccgttgcgaaccgcgcagatactcgcgccattgccaagatgcgccacaaccaggccggagtcatcttccgccagattcagcaggctatgtgcgcgctgggaaacatagcggtggctcgtgccgtggaaaccataacggcgtacacctaactcttcataatatttccacggcaggccgtataaataagcttccggagccatcgtctggtggaaactggtatcaaataccgccacctgagttacgcccggaaataattgctgcgcgctttcaataccacttaaattggcgtaattatgcaggggtgccagtggagaaacgcgacggatattatcaatgacttcatcggtaataatggcggactcggtaaaaatactgccgccgtgagcgatgcggtggccaattaaggccacactgtcatttaaattccgtttttccagttcaaatgcaattgccttcaatgcaccttcgtagctgtggtgagccagcggtgctggctctcccccatttacggataagaatgcattttcgctgttaataccgtcggcaataccactcattaatacttcacagtcgctggcatcgagcacggaaaacttaatgctagagctaccacagttaataaccaaaacaaccggaaattcattcatctcttttctcatcctgagttacggattaaaacagtttgtatacgatgttcaggatggtcagcagaccaatcacggtaacaaacacgttatccagacgaccacggtatttcgccagagacggcgctttacggatggcatacatcggcaacaggcacagcagggatgcgataatcggtgcgcccatggcttcaatcaggtcaaggatgttcgggttggcgtaggcaacaacccaggtggagcccatgatgaagatcatgctgatagtgttcagtttacccaggctcactttagttttgtcgcctttataaccaaacttcaggaccaggccattcagaccttccagcgttcccagatagtgaccgaagaaagatttgaagatagccacgagtgcgatgatggaagccgcatattccagtgtaatcgcgaacgttgttttggtaccggtcatggacgcaaagtggttagccagataagaaagcactggaatattctgcgctttggcttccgccatgttggccggagacagagtaaacaggcagctaaaggcaaagaacatcaccactgcaaccatcagcatgctggcacgagaaatgatttgggaacatttacgttcggtgaagtcgcgaccgaagtctttctcatactcttcacgcttagaaaccacgaaggaagagacgattgggctgaagttaaaggagaaaaccatgatggaaatccccagccagacagtgatcaggataccgtcatgaccggttaagctcaggctaccgaggtcaacctggtcgataactgcagagttccagtaagggatcaggctcaaagaaatcagcaccaggctggcgataaacggccataccaggtagctcatcactttaaccatcagatccttaccaaaccagatgacgaaagccatcagcagcaacaggaacagcgccacaaagccgcgattcagcggtgcaaagccgagctggttttcccagaacgtcataaaggtattggtaatagtaacgccataaatccacagcagtgggcaaatcgcgaagaagtacaggaacgtgataaccacgccgccagttttaccaaaatgctcttccaccgtttccgtaatgttgccggaagggttagagccagaaagacacagacgcgccagcgcccggtggcaataaaacgcgatggggtatgccaataccaacatcagaagaatcgggatcagtccgccaaaacctgcgcggatagggaagaacagcaccccggcgccgattgccgtaccaaacaagcctaacgtccatgtggtatcacttttacgccaggagctttgttttgtctggctggatacaatgctatcactagtactcatatcctatcctcaacgaattaattaagcgtcaacgaaaccggtgatttgagagacgcgagaaagatcgatattgccgccggaaataatactgacggtttttctgttttgaatatattggtctaatttaccgcttaataatgcagcacatgccagagcgcctgcgccttcggtgacgactttattgcgctgaattaaggcaatcatactgtttctgatttcgtcttcgctgaccagcacgatgtcatcgactaattcacgaacgatttcgtaagttaaattacccgggcgggagacatcacaaccatccgccagggtgccggtagttcggtgcgtggttatttctccggagtggaaagaagccgccatgccgtgaacgttttcagactgtacgccaataacacgaatggtcgggttaatagatttaattgccaccgcaataccagcaattaaaccgccaccaccaattggcacaatcacgttatcgacatcatagagatcttccataatttccagaccaatcgttccctggccagcaatcactttcggatcatcgtaaggtgggataaaaatacggccttccatttcgacaatttcgctcactttagcgatagtgtcgttgaagttatcaccatgcagaacgacttctgcggagtagtcgcacgttgccgctactttggattttggcgcaccttttggcatcaccactttaccgtcgatacccagcatcgcgcaggagagggaaaccccttgcgcatggttgcccgcagaacaggccaccacgcctttgcgtttttccgcatcggtcagactacttaatttattaaatgcgccacgaattttaaaactacccgtacgctgcatattttcaaacttcaggaatatttcacctttgcaacgttcactaaaatagttggagcgaggcatgcctgttttataaattcgcccagccagtcgttgtttcgcttcaataatgtcatcaatagcaaccggcagatcgtatgtaatatgcattataaaacctcttcgcctgaattaaatatgtaggtaaccgtaaccgacacctgcaagacagacaggtggattatttatgtttaaataaaaacaaataattaaccaacttctattaattgccttcgtctacacccattataagaactatactctttggctaattccaccaaaacgcttgctgcttttttaatacgataatttttgctccataccgcggcatattgtgccacaggtaatgtttcttcaaccggaatagtaataaattgattagaaccaaaaggactcgtcatatcacaaggaattacagttaagaaatcagcattgagaacaagattataaattgtcacgacactgtcggttttaacgatgttttcaatactgatgccatttctttgtaacgtagtaagcagttcgctgtagtaccccatattagtttgtggcaacacccactgttcgttcttcaagctctccagcgtggtggtgccggtgcatgttcgggacttactggctaccagcacaaactcggactcgaacagcggctcaacatgtaaatcctgaagcttcatttctgcacttaacgtaccaatcgcaaaatccagtcgaccgtcgcggattgccggtaagaagctagacagttgcgcttcatacatagaaacctgcgctttcgggaacacctctttgaacttgttgatcatcccactcataaaagtaaaaccaatcaaactaggaaaaccaaaactgacttccaccaccgcctcagaagacataccgcttatctcattaaccatatttttcatttcacgggtaatggattcggaacgggagagtaacaattgaccggcaggtgttaatgttacaccggtatttttccgcaccactaattccacaccaaaataatcttcaatatcgttaatgattttactgacggccggttgagttaaccctaattcttttgcagcgctgccgatagaaccacttctaatgacttcctgaaagactaccaggtgctgcgttttcggaagaagaatagtgctcataacgacctacgttaattacctcattgacggcatgaagtgtatcaaaatgaaatgaacaggatatgtgcgaccactcacaaattaactttcaatactttccagagtatcgttattacaattaaatacctttaaatatcaacaagttaaagtataaaaatcagcataaaccctgatttttgtcaaaaaaaatgacggggataaccatattttatggcgataacatcattcgttatgtggttaatacaaaaaaggggctgagaccatatttcaagcaattaccggataattaccaggcaaaatttgagttaaatttaatgagcaagttcagtaattttattataaataaaccatttagtgtgataaataatgcggcatgtcacatttttagtcgctatttgttggagaacaaacatttattttatcaatattttaaaattagcaatacatgtattgatcatctcgaacaattgattaacgtcaactttttctcttctgacaggacgagtttttgtgaatgcaatcgttttccataaattcttctcccctcataggcgacgaatagcattttgtgttgaggattacaaaacgaataattgctgatcgccgcgataaggtcagacaaagacaacaagggaaattttcacagagcttttgatcggcgtaggccacagaatgttgcttcgtttactgtaacgccgggtaaatgagcgttttttgatagtgcgaaagaaccctgcgaggaaaataagcatctattattgtttgtcatgatgacaaggcaggcatcaatgaaaggcttcccaattgcgcatatttttcaccctagtatcccgccaatgcacgcagtggttaacaatcacaatagaaatattgattattggacggtaaaaagaaagtttgcagaaattgtctccaccaatgacgttaataaaatttacagtataagtaatgaactgcggagagtattatctgcaataactgcattgaatttctatcatggcgatgttccttctgtcatgatccgaatccaaccggaaaatatgagtccattcattatagatatttctacaggagaacatgatgattatatcatacaaacattagatgtaggcacttttgcaccttttggtgaacaatgtacttgcagtgccgtcaataaaaaagagctggaatgtattaaggagacgatttctaagtattgtgcaaaattcacccgaaaagaagccatcttaaccccccttgtgcactttaataaaaccagcattactagtgattgttggcaaattctcttttttagtcccgatcattttaataatgatttttattgattatttataaaggataaaataatgttccctgttagtagtattggtaatgatattagtagtgatttagtccgtcgaaaaatgaatgaccttcctgaaagcccaacaggaaataacctcgaagcactagcaccaggtatagaaaaactaaaacagacctctattgaaatggtcactttacttaacacgttacaacctggtggaaaatgcattatcactggtgattttcaaaaagaattagcgtacttacaaaatgtaattctttataatgtcagctctcttcgtctggattttttaggttataacgcccaaattattcaacgaagcgacaatacttgtgaacttaccattaatgaaccgttaaaaaaccaggaaatatccacaggtaatatcaatattaattgcccattaaaagatatttacaatgaaatcaggaggttaaacgtaatttttagttgtgggactggagatatcgttgatctatcctctctggacttacgtaatgtcgatttagattattatgatttcacagataaacatatggctaatactattttaaatccttttaaattgaatagtacaaattttactaatgccaacatgtttcaggttaattttgttagtagtacacaaaacgccacaatctcctgggattatttactaaaaataacgcctgttttaataagcattagcgatatgtattctgaagaaaaaatcaagtttgtcgaaagttgtttaaatgagcctggagacattaccgaagaacaattaaaaattatgagatttgcaattataaaatctataccaagggcaactcttacagataaattagaaaatgaattaacaaaagaaatatataaaagcagtagcaaaatcatcaattgcttgaacagaattaaattaacagagatgaaagaattcagtagtgaaaaaatatatgattacatcgatataatcattgaagattatgaaaataccaaagaaaatgcttatctggtcgtcccccaaattaattatactatggatttaaacatagaagactctagcagtgaagagttacttagtgataataccctcgagaaagacgaaaattctccggacaatggctttgaggtcggggaatataacacatatgaagcatataacagtgagaagcaatattttaccagagaggactatacgtatgattacgaccttttaaatgcaatataaacttaataacttcttacaaagtctattattaataccgtagatatttattcatcttaccctgtgcaccaaaagcaaaaactcactgacgcgggtttgaaactgatggcaaccgcaaaaatgcctgatgcgctacgcttatcaggcctacgccatctctgcaatatattgaatttgcgtgcttttgtaggcaggataaggcgttcacgccgcatccggcatgaataaagcgcactcaacaatctgaaacccgccggaacggtttattacgtacatcaggtaaaactgaccgataagccgctttcttttgggtatagtgtcgtggacagtcattcatctttctgcccctccaaaagtaaaaacccgccgaagcgggtttttacgtaaaacaggtgaaactgaccgataagccgctttcttttgggtatagtgtcgtggacagtcattcatctttctgcccctccaaaagcaaaaacccgccgaagcgggtttttacgtaaaccaggtgaaactgaccgataagccgctttcttttgggtatagcgtcgtggacagtcattcatctttctgcccctccaaaagcaaaaacccgccgaagcgggtttttacgtaaatcaggtgaaactgaccgataagccgggttctgtcgtggacagtcattcatctaggccagcaatcgctcactggctcaagcagcctacccgggttcagtacgggccgtaccttatgaacccctatttggccttgctccgggtggagtttaccgtgccacggactgttaccagccgcgcggtgcgctcttaccgcaccctttcacccttacctgatcccgcttgcgcgggccatcggcggtttgctctctgttgcactggtcgtgggtttcccccccaggcgttacctggcaccctgccctatggagcccggactttcctcccctccgcccgtctcccccgaagaggacgacgacgaagcggcgactgtctggtcagcttcggcgcgcagtatagagggtttgcgcgcccttgtcaccccgcgttgcgcattccaatcgccagtgtcgcggcgatattacgactagcacggcagatattgtcataagccccgcggaatgcttcgtccaacgtacctatgctggtcaatacgctgaagaccgcatcaatgccatgctgatgtacaacgccaacatcatcggtcaggctacccgcaatgccaatcaccggtttatggtacttcttcgccacgtttgcgacaccaatcggtaccttcccgtgaatactctggctgtcaatacgcccttcaccggtgatcaccagcgtacaatcgtgaatatgttcctccagattcagcgccgtagtgacgatttcaataccacttttcagttccgcaccaagaaacgccattagcgccgcgcccataccacccgcagctcctgcaccggggacatctttcacatcaacatgcagcgcttttttaatgacctcggcatagtgagagaggttattgtccagctcaacaatcatcgcttcactggctcccttttgtgggccaaagatgcggcttgcgccgttatcgcccaccagcggattggtgacatcacaagcgacgcgaatgacgcaatcttttaagcgcggatcgaggccggaaatatcaatatcattcagagtattaagactaccgccgccaaaaccaatttcattgccgttggcgtcgcataatttcgcccccagcgcctgtaccatgcctgcgccgccatcatttgtagcgctgccgccaatgccgataataatgtttgtcgcaccgctctccagcgcctgcaggattaactcgcctgtgccgcgactagtggtcacgagtggatcgcgtttttccgcaggtaccagctccagcccactggccgccgccatttcaataaacgcggttttgccatcgccggagatcccccaactggcattcactttctcgcccagcggccctgtaacccaggcgtgacgttcagccccctgggtggctgcaatcatcgcttccaccgttccttcgccaccgtcggcaaccggaacagaaacgtactgtgcatcaggaaaaatttcccgaaatcctttttctatcgcctgcgcaacctcgctggcagataaactttctttataagagtctggggcgattacgattttcatacctatgcctgttaccacatgacgccggagggcgtttctcttattcggcctggattccaggcccggattgcaatacgccatccgggcacgacgtcattaacgagtaacttcgactttcgccagtttttcgtagtagcacgccagggcgctatgatccgccgttcctaaaccatctgctcgcagtgcctgcatcatctccataaccgcagctgtgagcggcagttgtgcgccgacgccgtgagaagtatccagcgcattcgccagatccttaatatgcagatcaatacggaagcccggcttgaagttgcggtccatcaccatcggcgctttggcatccagcacggtactgcccgccagtccaccgcgaattgcctgataaaccaggtccgggttaacgcccgctttagttgccagcgttaacgcttcactcatcgcggcaatattcagcgccacaatgacctgatttgccagtttggtgacgttacctgcaccgatttccccggtatgcaccacggaacccgccatcgctttcatcaaatcatagtatttgtcgaaaatagccttgtcgccgcccaccatcacactcagcgtaccgtcgatggctttcggttcaccgccgctcaccggagcatccagcatatcaatgcctttcgctttcagcgcttcgctgatttcacggcttgccagcggtgcgatagaactcatatcgatcaataccgtacctggcttcgcgccttcaataatgccattctcacccagcgccacctctttcacatgaggggagtttggcagcatggttatgatgacgtcgcactgttcagcgatcgctttagccgtagacgctgtttctgcacctgcagcaatcacgtcagcaatagcttctgggttacggtcagcaaccaccaggctgtaacctgctttcagaaggtttttactcattggtttacccataatccccaggccaataaaaccaactttcatagtcatatcaatcatctctcttgttgcggtggtggttattttttaaaggtatcagccagtttctgagtggcagagcggaagacgccgagatcgctgccgacagccacaaacgtcgcgccccattccagataacgacgcgcatcggcttcgaccggcgcgaggataccgctgggtttgccgtgcgcgctggcacggttaaaaatgtgctgaattgctttttgtacatccgggtgacttgcattgccgagatggcctaatgccgcggccagatcgctggggccgacgaagatgccgtctacgccttcggtagcggcaatggcatcgacgttatctacgccctgctgactttctatctggaccagaatagtgatgttcttgttgctctgagcgaaataatccgccacggtgccaaacatattggcgcggtgagaaacggagacgccgcgaatgccttccggtgggtaacgggtacttgccaccgccagctctgcttcctcttttgtttctacaaaaggaatcaggaagttatagaaaccgatatccagaagacgcttaataattaccggctcgttggtcggcactcgcactactggcgcgctggcgctgcctttcaaggccattaactgcggaataaacgtggagatatcgtttggcgcatgttcgccatccagcaccagccagtcaaacccagccaaaccaagaacttcagtgctaatcgggttagagagtgcactccagcaaccaatttgtacctgtttcgcagccagtgcggctttgaatttattcgggaaaacatcgttattcatcgcttatacctttgcttatttctgcaattccatacgtttaatgtcgccaactacgaagaggtagcagaccatcgccatcagcgcactacatcccacgaaaaccagtgctgcattgaaggagtgcagttcacttaccaggtagccaatcaccagtggagtgacaatggaggcaacattgccaaagacgttaaagacgccgccgcagaggccaacaatctctttcggcgcggtgtcagaaatcaccggccagcccagcgcaccaaatcctttgccaaagaaagccagcgccatcagcatgaccaccagcgtggtgttgttggtgtagttacataagatgatggtggaagccagcaacattcccagcacaatcggtagcttacgtgccagggtcagggataaaccgcgtttgatcagataatcgctgaagacacctcccagcacgccgcccgcaaaaccacacagtgctggaatgctggcgaccagacccactttcagaatgctcatgcctttttcctgcaccagataaatcgggaaccaggtgaggaagaaccaggtgatggtgttgataaaatattgtccgaaaaatacgcccagcatcatgcggttagagagcaattgcttgatgtaatgcagtttgggtccgcttgctgccgcactgcccggctttttgtggtccatatcgaccaccgcgccattttcagagataaacttcagctcttccgcagacatacgtgggtgatctgtcgggttatgaatcaacttgatccacagcgccgtcagcacaaaaccaatcacccccataacggtaaagacgtgctcccagccccaggcgaaagtcagccagccaagcagcgggctaaagagcgccaggctgaaatattgcgcgctgttaaagatggcggaggcagtaccacgttctttcgtcgggaaccaggcggcgacaattcgggcgttcgccgggaaacttggcgcttcgctgaagccgagcataaagcgcataaagaacatggagatccctgcccaggccagcgggaacatatcaacaaagccttgcaggaaggtgaataggctccagaaaaagaggctgtaggtgtaaacttttttgctgccaaacttatcaagcagccagccgccggggatttgcatcagcaagtaggcccagccaaaagcggagaagatgtaacccatgctaaccgcacttaactgcaactcttttgccacttcggtaccagcaatagacagcgttgcacgatcggcgtagttaacggcggtaacaataaaaataatcagtaatattaaatagcgggtatgcacgcctttctttttttcgtcaacggtgtccagaatcattttatttacctcgggtacttatgctgatttttattattatggggaaggtgttatttatgagtttcatttatgccgtaacgacaatgaactcgggaattagtataagcagcgcgagaataataatcattgtgcaaatgctaatttaattaatactatttaaatattattttgagcatatgcacataaggttgcgcgctaaagcacagatttgcgctttaccttaccgggcggcactgcaatccctgaaatgattgacattgatcacatttctgcgtttaaactcctgacattcttatttcacccaatgaagtcatttatttttaaatgagaccaggtcctcattttaataacccctggctggagaatattgcacaatggccaacatcgaaatcagacaagaaacgccaactgcgttttatataaaagttcacgacacagataatgtggcaattattgttaatgataatggcctgaaagcaggaacgcgttttccggatgggctggaattaattgaacatattccccaggggcataaagtcgcattgctggacattccggctaatggtgaaattattcgttatggcgaagtgattggttacgccgtgcgtgcaatcccacgcggaagctggatcgacgaaagcatggttgtactaccggaagcgccgccgttacacacgctgccactggcaaccaaagtcccggaacccttaccgccgctggaaggatacacctttgagggctatcgcaatgccgatggcagcgtgggcaccaaaaacctgctcggtatcaccaccagcgtccactgtgtggcaggcgtggtggactatgtagtaaaaatcattgaacgcgatctgctaccgaaatacccgaacgtcgatggcgtggtggggctgaatcatttgtacggttgtggcgtggcgattaacgcaccggcggcagttgtacctatccgtaccattcacaatattagcctgaatcctaactttggcggcgaagtaatggtgattggcctgggttgtgaaaagttgcagcctgagcgcctgctgactggaacggatgatgtgcaagctattccagtagaaagcgccagcattgtcagtttgcaggatgaaaagcatgtcggttttcagtccatggtcgaggatattttgcagatcgccgaacgccatctacaaaaactgaatcaacggcagcgagaaacctgcccggctagtgaactggtcgttggtatgcagtgcggtggcagcgatgcgttttctggtgtaacggcaaacccggcggttggctatgcgtctgatctactggtgcgctgcggcgcaacggtgatgtttagtgaagtaacggaagtgcgtgacgcgatccatctgctgacaccacgcgcagtgaacgaagaggtcggcaaacggctgctggaggagatggagtggtacgataactatctcaatatgggaaaaaccgaccgcagcgccaaccctagcccgggcaacaagaaaggcggtctggcaaacgtggtagagaaggcactcggctccattgctaaaagcggtaaaagcgcaattgttgaagtgctgagccccggtcaacgcccgactaaacgcggattaatttacgccgcgacgccagccagcgattttgtctgtggcacgcaacaggtggctagcggtatcacagtgcaagtgtttacgaccggtcgtggtacgccgtacggcctgatggcggtacccgtcattaaaatggcaacccgcaccgagctggcgaaccgctggtttgatttaatggatattaatgcgggcaccatcgctaccggcgaagaaactattgaagaggtgggctggaagttgttccactttattctcgacgtcgccagcgggaagaagaaaaccttcagcgatcaatgggggctgcataaccagctggcggtgtttaacccggcaccggtgacctgatttcttttggaacgtccctcgcaaaacatggccttagtgccatgtttttattgtttaaagcccccacgtccattaataatgcatttgcattaccttagttcaagcttataatttgagcagaaaacaggctgtaaaaggacagtgaatcatgcccgctaatgctcgctctcacgctgtactgaccactgaaagtaaggtcacgatacgcggacaaacaactatccccgcgccagtgcgtgaggccttaaaactgaagccaggccaggacagcattcattacgaaattctgcctggtgggcaagtatttatgtgccgactgggagatgaacaggaggatcatactatgaatgcatttttgcgttttctggatgcagatatccagaacaacccgcaaaaaactcgtccattcaacattcaacaaggaaagaaacttgtcgctggcatggacgtcaacattgatgatgagattggcgacgacgaataatggattttccacaaagggttaatggttgggcgctatatgctcatccctgttttcaggaaacctacgacgctttagttgccgaagtcgagacattaaagggaaaagatcctgaaaattatcagagaaaagccgccacaaagttattggcggtagtccataaagtgattgaggagcatatcacggtcaatccaagtagtccggcattccgtcatggcaagagcttaggctctgggaaaaataaagactggagtcgggtaaaatttggtgctggtcgttatcgtctcttctttcgttatagtgaaaaagagaaagtcatcattctgggatggatgaacgatgaaaacactctgcgcacctacggtaaaaaaacagatgcctataccgtattcagcaaaatgttaaaaagaggacatcctcctgccgactgggaaaccctcacccgagaaacagaagaaacccattgatggtgttcacaatgcccgccgaacgcattcgtgttgaccagcgggcatcctttctcactccccgaccagaatcacttcaaccccagcctttcgcagtccttccaggctatccgcaggaatgccttcatcaacaatgatcatgtcgatacgttgagtatcaatgatcttatgtaaactggaacgattgaacttactggaatcggtgaccacgatgatccgttccgcaacttcgcacatccgacggtttaaacgagcttcatcttcattatgtgtgctgacgccgcgctccagatcgatcgcatctacaccaagaaacagcatatcgaagtggtaattttgcaggctttgctcagcctgatcgccgtaaaaagattggctctgacggcgcaaatgcccgccggtcatcagcagctcaacgccttccgcttccagcaacgcattagccacgttcataccgttggtcatcgcaattacgtcagtgtgcttgcgcatcagacgagcaatctcaaaagtggtggtcccggaatcgaggataacccgatgacctggctgaatcaactcaacggcagctttcgcaacgctgcgtttcatcgcggtgttcagtgcgcttttatcttccacacttggctcgacactcggcgtcgtgctatcgcagatcaacgcgccaccataggcacgcacagcgatcccctgcttttccagaaacgccagatcgttgcggatcgtcacagtagatacgccatacaatgcgctcagatcgttaacctgcacactcccttgctgtcgcagacgctgaatgatctgttctcgtcgctcgctggtgccagtcactcgcttctcaccactagcgtcggtattactcatagtaagtcctttcgtaaaactttcgtttcatttcgttttgcctattaacgcctttctattaagcaaatgcaagcccaccttgcccattgacgcaagctactctcgtttcagtgactttcattatgtttcttttgtgaatcagatcagaaaaccattatctttcgttttatttttatctcaccatgacgcagtatcaactgaaacaaaacgaaagattaatatcgcagtaatctgaactggagaggaaagtgaaacatctgacagaaatggtgagacagcacaaagcgggcaaaacaaatggaatttatgccgtttgttccgcacatccgctggtgctggaagctgcaatccgctacgccagtgcaaaccaaacgccgttactgattgaagcaacctccaatcaggtagaccagttcggcggttataccggaatgacgcccgccgattttcgcggctttgtttgtcagctcgccgacagcttgaatttcccgcaggatgcgttgattctgggtggtgaccatctggggccaaaccgctggcaaaacctgccggccgctcaggcaatggccaatgccgatgatttgattaaaagctacgttgcggcaggattcaaaaaaatccaccttgattgcagcatgtcctgtcaggacgatccgattcccttaactgatgacatcgtggctgaacgcgccgcccgtctggcgaaagtggcggaagaaacctgtcttgaacactttggcgaagccgatctggagtatgtcattggtaccgaagtgccggtacctggcggcgcgcatgaaaccttaagcgagctggcggtcaccacgccggatgccgcccgcgccacgctggaagcccatcgtcacgcctttgaaaagcaaggtttgaatgccatctggccacgcatcattgccctggtggttcaacccggcgtcgaattcgatcacaccaacgttattgattatcagcccgccaaagcgagcgccttaagccagatggtcgaaaactacgaaacgctgattttcgaagcgcactctaccgattatcaaacgccgcaaagcctgcgccagctggtgattgaccactttgccattctgaaagttggcccagcgctgaccttcgccctgcgtgaagctctgttctctctggcggcgattgaagaagaactggtgccagcgaaagcctgttctggtctgcgtcaggtgctggaagacgtgatgctcgaccgcccggaatactggcaaagccactaccacggtgacggcaacgcgcgtcgtctggcgcgtggttatagctacagcgatcgcgtgcgctattactggccggacagccagattgatgacgctttcgctcatctggtacgtaatctggcggatagtccaattccgctgccgctgatcagccagtatctgccgctgcagtacgtgaaagttcgctccggcgagctgcagccaacgccacgggaactcattatcaaccatattcaggacatcctggcgcagtaccacacagcctgtgaaggccaataagcaaaacaaagaggaacacgctatgccaaatattgttttaagccggattgatgaacgcttgattcacggtcaggtcggcgttcaatgggtcggatttgcgggggcaaatctggtgctggtagccaacgatgaggttgccgaagatccggtacaacaaaacctgatggaaatggtactggcagaagggatcgccgtacgtttctggacgctgcaaaaagttatcgacaacattcatcgcgccgccgatcgacagaaaatcctgctggtttgtaaaacacccgccgatttcctgacgctggtgaaaggtggcgttccggtgaatcgcattaacgttggcaatatgcactacgccaatggcaaacaacaaatcgccaaaacggtttctgtggatgcgggcgatatcgcagcatttaacgacctgaaaaccgctggggtggaatgcttcgttcagggcgtcccgacagagcctgctgtggacctctttaaattactttgagggattcatcatggaaatcagcctgttgcaggcatttgcgttgggcattatcgcctttatcgctggcctggatatgtttaacggcctaacccatatgcaccgcccggtggtcctcggcccgttggtcgggctggtacttggcgatctgcataccggaattttaaccggcggtacgctggaactggtgtggatggggctggccccgctggcgggcgcacagccgcctaacgtgattatcggtactatcgtcggcacggcgtttgccattactactggcgtgaaacccgatgtcgcagtaggtgtcgccgtacctttcgctgtcgcagtacagatggggattaccttcctgttcagcgtgatgtccggcgtgatgtctcgctgcgacctggcaacaaacccgcgccgcatttgatgctggtgccgacggcctggtgcattgctataacgggatgacaggtttacatcaccgcgaaccgggaatggttggcgcgggattaacggacaagcgcgcctggctggaactgatagccgatggtcatcatgtgcatccggcggcaatgagcctgtgttgttgctgtgcgaaagagagaatcgtactgatcaccgacgcgatgcaggcagctgggatgccggatggtcgctatacgttatgtggtgaagaagtgcagatgcacggtggcgttgtccgtaccgcgtctggtgggctggcgggcagtacgctgtctgttgatgcggcagtgcgcaatatggtcgagttgacgggcgtaacgcctgcggaagccatccatatggcgagcctgcatccggcgcgaatgctgggtgttgatggtgttctgggaagccttaaaccgggcaaacgcgccagcgtcgttgcgctggatagcgggctacatgtgcaacaaatctggattcagggtcaattagctagcttttgatagtttgctcctttattgggccttcacttcccccgtaaggcctttctttttctttcgttttgatctgtgcagcggtgtcggatgcgacgctaacgcgtcttatccgacctacagttggtgaccgcaaggccggataaagcgtttgcgccgcatccagcaatcccttttgcttcctttatcttttctttcaacgatcacaaatttcgttttatttcttttttctccattgaactttcagtttcttttctatagattttaatcaacgaaagacatcaccaagtgaaatgaaacgaaaggcaagtgaaagcgacaacgcccgacgtcaagttcatcagactaaggattgagttatgccagaaaattacacccctgctgccgccgcaaccggtacatggactgaagaagagatccgccatcagcctcgcgcatggatccgtagtctcaccaacatcgacgcgctacgttccgcgctcaataacttccttgaaccgttactgcgcaaagagaatctgcggatcatcctgaccggagccggaacgagcgcatttatcggtgacatcatcgcgccgtggctcgccagccataccggtaaaaacttcagcgccgtaccgaccaccgatctggtcaccaatccgatggactacctgaacccagctcatccgctgctgttgatctccttcggtcgatccggcaacagcccggaaagcgtcgcagccgtggaactggcaaatcaatttgtaccggaatgctatcacctgccgatcacctgcaacgaagcgggcgctctttaccaaaacgcgatcaacagcgataacgcgtttgccctgctgatgcccgcagaaacgcacgatcgcggctttgcgatgaccagcagcattaccaccatgatggccagctgcctcgcggttttcgcacctgagacgatcaacagccaaaccttccgcgacgtggcggatcgttgccaggcgatcctgaccagtctgggcgatttcagcgaaggtgtgtttggttacgcaccgtggaaacggatcgtttatctcggtagcggtggcttacagggcgcagcacgcgagagcgcgctgaaagtgctggaactgacggcgggtaaactggcggccttttatgattctccaaccggattccgtcatggaccaaaaagcctggtcgatgacgaaacgctggtggtggtatttgtctccagccacccttacacccgtcagtatgatcttgatctgctggctgaacttcgccgtgacaaccaggcaatgcgtgtaatcgccatcgccgcggaaagcagcgacatcgtcgctgccggtccacatatcatcctgccaccgagtcgtcactttatcgacgttgagcaggcattttgcttcctgatgtacgcccagacgtttgcactgatgcagagcctgcacatgggcaatacgccggataccccaagtgccagtggcaccgttaaccgcgtggtgcaaggcgtaatcattcatccgtggcaggcataagaggatcgcattatgagcattatctccactaaatatctgttacaggacgcccaggccaatggctacgcggtgcctgcttttaacattcataacgccgagacgatccaagcgatcctcgaagtgtgcagtgaaatgcgaagcccggtgatcctcgccggaacgccggggacctttaaacacatcgcgctggaagagatctacgccctgtgtagcgcctattccacaacctacaacatgccactggcgctgcatctcgaccaccacgaaagcctggatgatattcgccgtaaagtccacgcaggtgtgcgcagtgcgatgatcgacggcagccacttcccgtttgccgagaacgtgaagctggtgaaaagcgttgttgacttctgccacagtcaagattgcagcgtggaagcagaactgggccgcctgggcggtgttgaagatgacatgagcgttgacgccgaaagtgcattcctgaccgatccacaagaagctaaacgctttgtcgaactgactggcgtcgacagcctggcggtagcgattggtacggcgcacggcttatacagcaaaacgccgaagattgatttccagcggctggcggaaattcgtgaagtggtggatgttcctctggtgctgcatggtgccagcgatgttccggatgaatttgtccgtcgcactattgaacttggcgtcacaaaagtgaacgttgccacagaattaaaaatagccttcgctggcgcggttaaagcctggtttgcggaaaatccgcagggtaacgatcctcgttattatatgcgcgtcggaatggatgcgatgaaagaagttgtcagaaataaaattaatgtctgtggtagtgcgaatcgaattagtgcataatcattagttttttatgatttatcccaatgtacttcccgattaatatcggggagtgccttaatggaaaaggagataactaaaccttaataaatacatcactacaatatcgcaacaataatatatttaaaaaaattatattattcaactttatggtgaggattacacaatgaccagtccaaatattctcttaacccgtattgataaccgtctggttcacggtcaggttggcgtgacctggacatccaccatcggtgcaaatctgctggtagtcgtggatgatgttgtcgctaacgatgatattcaacagaaattaatgggtattaccgcggaaacctacggctttggcattcgtttctttactatcgaaaaaaccattaacgtcatcggcaaagctgcaccacatcagaagatcttcctgatttgccgtacgccacaaacggtacgtaaattggtagaaggtggtattgacctgaaagatgtcaacgtcggcaatatgcatttcagcgaagggaaaaagcaaatcagcagtaaagtttatgtcgatgaccaggatctcacggacttacgttttattaaacaacgtggcgtgaatgttttcattcaggacgtccctggcgatcaaaaagaacaaatccctgactaaatctaaaatcgccttaatattggtttgaggtaataaaaatgcatgaaataaccctacttcagggattatccctggcggcgttagtttttgttctggggattgatttttggctggaagccttatttttattccgcccgataatcgtttgtaccctaactggcgctattctcggtgatattcagactggcttaattaccggtggtctgacagagttggctttcgccggattaacccctgcaggtggtgttcagccgcccaacccgattatggcgggtctgatgaccaccgtcattgcatggtctacgggcgttgatgccaaaacagcaattggtcttggcctgccgtttagtttgttaatgcagtacgtcattctgttcttctattccgctttcagtttatttatgaccaaagccgataaatgcgcgaaagaggcggatacggcagcgttttcccggcttaactggacaacgatgctcatcgtcgctagtgcgtatgcggtgattgctttcctctgtacttacctggcacagggggcgatgcaggcgctggtgaaagcgatgcccgcctggctgacccacggctttgaagtggctggcggtattctgcctgccgttggttttggcttgctgctgcgcgtaatgttcaaagcgcaatatatcccttacctgatcgccggtttcctgtttgtttgctacatccaggtcagcaacctgttgccggttgccgtactgggcgcaggctttgcggtgtatgagtttttcaatgcgaaatcccggcagcaagcgcaaccgcagcccgttgccagtaaaaatgaagaagaggactacagcaatgggatctgaaatcagtaaaaaagatatcacccgtctgggctttcgtagcagcctgctgcaagcgagctttaactacgaaaggatgcaggcgggcggttttacctgggcgatgttgccgatcctgaaaaagatttataaggacgacaaaccgggcttaagcgcggcgatgaaagataacctcgaatttattaatacccacccgaatctggtcggattcctgatggggttattaattagcatggaagaaaaaggagaaaaccgcgacaccattaaaggcctcaaagtggcactgtttggcccaatcgccgggattggcgatgcgattttctggtttactttgttgccgattatggcgggaatttgcagtagttttgccagccagggaaacctgctggggccgattctatttttcgccgtttacctgcttatctttttcctgcgcgtcggctggacccacgtcggttatagtgtcggcgtgaaggcgatcgataaagtgcgagagaacagccagatgattgcccgtagcgcaaccatcctcgggatcacggtaatcggcgggctgatcgctagctatgtgcatattaacgtggtgacaagctttgccatcgacaatacccacagcgttgcgctgcagcaggatttcttcgataaagtcttcccgaacattttaccgatggcctacaccctgctgatgtattacttcctgcgggtgaaaaaagcgcatccggtgctgttaatcggcgtgacttttgtgctctctattgtttgttccgcattcggcattttgtaaatggaacgaggcactgcgtctggtggtgcctctttacttaaggaatttcatcctgtgcaaacccttcagcaagttgaaaactatacggcgttaagtgaacgtgccagcgaatatttattggccgtgatccgtagcaaaccgaatgccgtgatttgcctggcgaccggagccacgccattactgacgtatcattatctggtagaaaaaatccaccagcagcaggttgatgtcagccagctcaccttcgtgaagctcgacgaatgggtggatctgccattaacgatgccaggcacctgcgaaactttcctgcaacagcatatcgtgcagccgctggggctacgtgaagaccagctcatcagctttcgctccgaagagataaatgagacagagtgcgaacgggtaacgaacctgattgcgcgcaaaggcggtctggatttatgcgttctcggattggggaaaaacggtcatcttgggctgaacgaaccgggagaaagcctgcaaccggcctgccatatcagtcaacttgatgccagaacacagcaacatgagatgttaaaaaccgcgggtcgccccgtgactcgtgggatcaccttaggcctgaaggatattctcaatgcccgcgaagttttgttactggtgactggcgaaggaaagcaggatgcgacagatcgttttctcacggctaaagtctctaccgctatcccggctagttttttatggctgcacagtaactttatttgtttaattaacacctaaccagatgaaaaatttgctcaaaatgtttaaattaacttatgtaacagtcacgcattatattaaataacatttgactgggttgaacataacgccgatagcaaaaggagttatgttcaacaatttaattttagatatacatataacttgttctattaataaatcacctcgtattctgactcgccccctggcgcagcaaagtcaggcatttatactcttttgaatacatagaaaattgatatcaatataatgaaaatatcaaatatttgcatataaatataatcttaaagttcagtctatttaatgttcaatgaaatatttctgcctgtataatctttaaagatgttgaacatatattcacattaaatatgattatgtacttgttacaaggataaggttatatatgaataaagttacaaaaacagctattgcgggcttacttgcgcttttcgcaggtaatgccgctgcaaccgatggtgaaatagtttttgatggcgagattttaaaatccgcttgtgaaatcaatgactctgataagaaaattgaagttgctcttggtcactataatgccgaacagtttcgtaatattggcgagcgtagcccaaaaattccattcactattcctttagttaactgcccaatgactgggtgggagcacgataacggcaacgttgaagcgtctttccgtctatggctggaaacgcgagataatggcaccgtccctaacttccctaatctggcaaaagtaggctcttttgctggcatagcggcaacaggtgtgggtatccgtattgacgatgcggaaagcggaaacattatgccactgaatgctatgggcaatgataacacggtttatcagatcccggcggaatccaatggtattgtcaatgttgacctcatcgcttactacgtaagtaccgtagttccaagtgaaatcaccccaggggaagcagacgctatcgttaacgtaacgctggattaccgttaatacgttagggcgttatctgacctgtcagataacgcccttttccttcctctttctcgttgtatcaggttgaaaaataactatgagtaaacgaacattcgcggtgatattaaccttgttgtgtagcttctgtattggccaggcgcttgcaggaggaatcgttttacagcgaacgcgagtgatctatgatgccagccgcaaagaggctgcgttacctgtcgcaaacaaaggcgcagaaacgccttatttactgcaaagttgggtagataatatagatggtaaaagccgtgccccatttattataaccccaccgctatttcgtcttgaggctggcgatgacagtagtctgcgaattattaaaacagctgataacctgcctgaaaataaagagagcctgttctacattaatgttcgtgccattccagcaaagaaaaaaagtgatgatgttaatgctaacgagttgacgctggtatttaaaacacggatcaaaatgttttatcgccccgcacacctgaagggacgggtaaacgatgcgtggaaaagtctggaatttaaacgtagtgaccatagtctcaatatatataacccaactgaatattacgtcgtatttgccggactggcagtcgataaaaccgatctcacaagcaaaattgaatatatcgcgcccggagaacataaacagttaccacttcctgcatctggcggaaagaacgtgaaatgggctgcgatcaatgattatggcggcagttccgggacagaaactcgtccactgcaataaaaaatataaaaacacaggtcatcagggaatgccacaacgacaccaccagggacataaacgcacaccgaaacagttggcgctcatcatcaaacgttgtttgccgatggtgctcactggcagcggcatgctttgcactaccgctaacgccgaagagtattatttcgaccccattatgctggaaaccacaaaaagtggtatgcaaacaaccgatctgagccgttttagtaaaaaatatgcacaactaccaggaacttatcaggttgatatctggctgaataaaaagaaggttagtcagaaaaaaattacatttaccgccaatgcagagcaacttctgcagccacagtttacggtagaacaactacgtgagctgggtattaaggtggatgaaatcccggcgctggctgaaaaagatgacgatagcgtgatcaacagccttgaacaaatcattcccggtacagctgctgaatttgatttcaatcatcagcaacttaatttgagcattccccaaattgcactgtaccgtgatgcaagaggttacgtctccccttctcgttgggacgatggtataccaacgctgtttaccaactacagctttacaggttctgataaccgttaccgccagggcaatcgtagccaacgacagtacctgaatatgcaaaatggtgctaattttggcccctggcgattacgcaactattccacatggacacgcaacgatcagacaagtagctggaataccatcagtagttatttacaacgtgatatcaaggcgttgaagtctcagttgcttctgggagaaagcgccaccagcggcagtattttttccagctacacctttactggcgtgcaactcgcttccgacgataatatgttgccaaacagccagcgcggatttgccccaacggtacgcggtatcgcaaacagtagtgcaatcgtgactatcaggcaaaatggttatgtgatctatcaaagcaacgtgagtgcgggtgcctttgaaattaacgatctctacccctcttccaacagcggcgatttagaagtcacgattgaagaaagtgacggtacacaacgtcgctttatccagccttattctagtttacccatgatgcagcgacctgggcatctaaagtatagcgcgaccgctggacgctatcgcgctgatgcaaacagtgatagcaaggaacccgaatttgctgaagccacggcaatatatggtttgaataatacttttacgctgtatggcggcctgctcggttctgaagattattatgcgctggggatcggtatcggcggcacacttggcgcactgggcgcgttgagcatggatatcaacagagctgacacccaattcgataaccagcactcttttcatggctatcaatggcgtacgcagtacatcaaagatatcccggaaaccaacaccaatatcgctgtcagctactatcgctataccaacgatggctattttagttttaatgaagccaatacccgcaattgggactataacagtcgccaaaaaagtgaaattcaattcaacatcagccagacaatatttgatggggtaagtctgtatgcctccggtagccagcaagactattggggcaataacgataaaaacaggaatatctctgttggggtttccggccagcaatggggagttggttacagcctgaattatcaatacagccgctacactgatcaaaataatgaccgcgcactctctttgaatctcagtattccgttagaacgctggttaccgcgtagccgggtttcctatcagatgaccagccagaaagatcgcccaacccaacatgaaatgcgtcttgatggcagtctgctggatgatggtcgcctgagctatagcctggaacaaagtctggatgacgataacaaccataacagtagcctgaacgccagttaccgtagtccttatggcaccttcagtgccggatacagctacggtaatgacagcagccaatacaattacggcgttaccggcggcgtggttatccatcctcatggcgtgacgctcagccaatatctgggcaacgcttttgcgcttatcgatgctaacggagcatctggcgtgaggatacaaaactatccggggattgctaccgatccttttggctatgcagtggttccttatctcacaacttatcaggaaaaccgtctcagcgtagatactacgcagctgcccgataacgtcgatcttgaacaaacaacacagtttgtggtgcccaacagaggtgcaatggtagcggcgcgtttcaacgccaatatcggttatcgcgtacttgttacagtcagcgatcgcaacggtaaaccgttgccctttggcgctcttgccagcaacgatgatacggggcaacaaagtatcgtcgatgagggcggcatactatatctctctgggataagcagtaaaagtcaaagctggactgtacgctggggaaatcaggcagatcaacaatgtcagtttgctttcagtacaccggatagtgaacctacaacctctgtattacaaggcacagcgcagtgccattaaggataaaaaaatgaaaagagcgcctcttataacaggtcttttgttgatatccacatcctgcgcttatgcctccagtggagggtgtggagccgacagcactagcggtgcgacaaattacagcagtgtggttgatgatgttacggtgaaccagacagataacgtgacaggacgggagtttacctctgcaacgctaagtagcactaactggcaatacgcctgttcctgctctgcgggtaaggcagttaaacttgtctatatggtcagccccgtacttaccaccactggacatcagacaggatattacaaactcaatgacagcctggatattaaaaccacattacaggcaaacgacattccaggactcacaaccgaccaggttgtctctgttaacacccgattcacacagataaaaaacaacacggtatattctgctgcaacccaaacgggtgtttgccagggtgatacgtctcgttatggacccgttaatattggtgcgaacaccacctttaccctgtatgtcaccaagccatttctcggcagcatgaccattccgaaaacggatattgccgtcattaaaggcgcgtgggtcgatggaatgggaagcccgtctacaggtgacttccatgatttagtcaagttaagcattcagggaaatctcaccgccccacagagctgcaaaattaatcagggcgatgttattaaggttaattttggattcatcaatggtcagaagtttaccacccgcaatgccatgccagacggttttactccagtagactttgatatcacttatgactgtggtgatactagtaagattaaaaacagcttgcaaatgcgcatcgacggtacaactggggtagtagaccagtacaacctggtcgccaggcgaagaagtagtgacaatgtgcccgatgtcggtattcgtattgaaaatctcggcggcggagttgcaaatattccttttcagaacggtatccttcccgttgatccttccgggcatggcaccgtcaatatgcgcgcctggccagttaatctggtcggtggtgagctggaaacaggaaaatttcagggcacagccaccattaccgtcatcgtgcggtaaaagaagacgttgcgttttgattaacgcaacgcttcggcactgttacccctgctgctccagcgcatacttatacagcgcatttttcttcacgccgtgaatttctgcggccagcgccgccgcttttttcagcggcagttctgcctgtagcagcgccagcgtgcgcagggcatcggcgggtaagtcttcttcctgtgctttatgaccttcgacaatcagcaccatttcgcctttgcgacggttttcatcttcctttacccacgccagcagctcgccaacgggcgcgccgtgaatggtttcccaggttttggtcagctcacgcgccagaaccacgtagcgggattcgcctaataccgcaacgatatcttccaggctatctaacagacggtgggtagattcataaaaaatcagcgtgcgcggctccgcttcaatggcttttagcgcatcacggcggcctttacttttggcaggtaaaaagccttcgtaacagaaacggtcagagggtaaacccgctgcgcttaacgcagtgatagcagcacacggcccgggtagcggcaccacgcggatccccgcttcacggcaggtacgcaccagatggtagccaggatcgttaattagcggcgttccggcatcggaaaccagcgcaatgttttgcccctcttgcagcttcgccagcagcgtttcagctttttgttgttcgttatggtcgtgcagcgcaaacaaccgggcattaatcccaaaatgttgcagcaataaaccggtgtgacgagtatcctcggcggcaatcagatcaacggcctgtaatacctctaacgcacgctgggtgatatccgccagattgccgattggcgtcggtacaatgtaaagctggccctgagaattatccgcgctttggtgttgtttcattgtgtcgtccgtattgccgatttaatattgagcattgcgtaaaaaaaatatcactggatacattatggtacccagtacattttctcgtttgaaagccgcgcgttgtctgcctgttgttctggcagccctgattttcgccggttgtggcacccatactcccgatcagtccactgcttatatgcagggcacggcgcaggctgattctgccttttatcttcagcagatgcagcaaagctctgatgataccaggatcaactggcaattactcgccattcgtgcactggtgaaagaaggtaaaaccgggcaggcggttgagttgtttaaccaactaccgcaagaactgaacgatgctcagcgtcgcgagaaaacactgctggcggtagagattaaactggcgcagaaagattttgctggcgcgcaaaacttgctggcgaaaatcacacctgccgatttagaacaaaaccagcaagcgcgttactggcaggcaaaaatcgatgccagccaggggcgtccttccattgatttactgcgcgcgttaattgctcaggaaccgctgcttggcgcgaaagaaaaacagcagaatattgatgccacctggcaggcgctctcctccatgactcaggaacaggcgaatacgctggtgatcaacgccgacgaaaatattctgcaaggctggctggatctgcagcgcgtctggtttgataaccgtaacgatcccgacatgatgaaagccgggatcgccgactggcagaaacgttatccgaacaatccgggcgcgaaaatgctgccaacgcagttggttaacgtaaaagcgtttaaaccagccagcaccaacaaaatcgccctgctgttgccactgaatggccaggcagcggtatttggtcgcactattcagcaaggctttgaagcggcgaaaaatatcggcactcagccagtggcagctcaggtagctgccgcacctgccgcagacgtagctgaacaacctcagccgcaaaccgtggatggcgttgccagcccggcacaagccagcgttagcgatctgaccggtgaacagcctgcagcccagccggtgcctgtaagcgccccggcgacaagcaccgcagcggtaagcgcacccgcaaatccatccgcagagctgaaaatctacgataccagtagtcaaccacttagccagatcttaagccaggttcagcaggatggcgcgagtattgtggtcggtccgttgctgaaaaataacgttgaagagttgctgaagagcaacactccgctgaacgtactggcactgaaccagccggagaatatcgaaaatcgcgtcaatatttgttacttcgcgcttagtccggaagacgaagcgcgcgatgcagcgcgtcatattcgtgaccagggtaaacaagcgccgctggtgctgatcccacgcagtagtttgggcgatcgcgtagccaatgcgtttgcgcaagagtggcagaaactgggcggcggcaccgttctgcaacaaaaatttggttccaccagcgaattacgcgcgggtgttaacggcggttctggtattgctttaacgggtagcccgattactctcagagcgacaaccgactccggcatgacgaccaacaatccaacgctgcaaaccacgccaaccgatgaccagttcaccaataatggcggtcgtgtcgatgcggtgtacattgtggcaacgccgggtgaaatcgcttttatcaaaccgatgatcgccatgcgtaacggtagccagagcggtgcaacgctgtacgccagctcccgcagtgcgcaagggaccgctggcccggatttccgactggagatggaaggcttgcagtacagcgaaatcccgatgctggcaggcggtaatctaccgttaatgcagcaggcactcagcgcggtgaataacgattatagtctggctcgcatgtatgcgatgggcgtcgatgcctggagcctggcaaatcatttcagtcaaatgcgccaggttcagggttttgaaatcaacggtaataccggaagcctgacggctaacccggattgcgtgattaacaggaacttaagttggctacagtaccaacaaggtcaggtagtccccgtcagttaaattaagtgattaacaggaacttatcatggctacagtaccaacaaggagtggtagtccccgtcagttaaccaccaaacagaccggcgatgcgtgggaagcacaagcgcgtcgctggctggaaggcaaaggactgcggtttatcgccgctaacgtgaacgagcgtggcggcgagatcgatctgataatgcgtgaaggccggaccaccatttttgtcgaggtacgctatcgccgctctgcgctttatggcggcgcggcagccagtgtgacccgcagcaaacaacacaaattattacagactgcccgcttgtggctcgcgcgtcataatgggagttttgatactgtggattgccggttcgatgtggtagccttcaccgggaatgaggttgagtggattaaggatgcctttaatgaccacagttaattaaggtttaaggattagcgtgcaagaaagaattaaagcttgcttcactgaaagcattcaaactcaaattgcggcggcagaggcgcttccggatgccatctcccgtgcagccatgacgctggttcagtctctgctcaatggcaacaaaatcctctgttgtggtaatggaacttccgctgccaatgcacagcattttgctgccagcatgatcaaccgtttcgaaacggagcggcccagcttacctgccattgcactaaatactgataatgttgtcttaacggcgattgccaacgatcgcttacatgatgaagtgtatgcaaaacaggtgcgggcgctgggtcatgcgggagatgtattgttagccatttccacccgtggcaacagccgcgatattgttaaagcagttgaagccgccgttacgcgtgatatgaccattgtggcattgaccggctatgacggcggcgaacttgcaggtttgttagggccacaggatgtggagatccgcattcctagccatcgtagtgctcgcattcaggaaatgcatatgctgacggtaaattgcctgtgcgatctgatcgataacacgcttttccctcaccaggatgattaaggagaatacatgaaggcattaagcccaatcgcagtccttatttccgcgctgctgttgcaaggttgtgttgccgctgccgtagtgggtaccgctgctgtgggtaccaaagccgcaactgacccacgcagtgtcggcacccaggtggacgatggtaccctggaagtgcgcgtgaacagcgcattgagcaaagacgaacagattaagaaagaagcgcgcattaatgtaacggcctatcagggcaaagtgctgctggttgggcagagtccaaatgctgaacttagcgctcgcgccaaacagattgctatgggcgtagacggtgccaacgaagtgtataacgagattcgtcagggccagccgattggtctgggcgaagcatctaacgatacgtggatcaccaccaaagtgcgtagccagctcttaaccagcgacctggtgaaaagctccaacgtgaaagtgaccaccgaaaacggtgaagtgttcctgatggggctggtgactgaacgtgaagcgaaagcggcggcagatattgccagccgggtgagcggcgtgaagcgggtaactacggcgtttacgtttattaaataacagccccttgtaatgcctgatgcgacgcttgccgcgtcttatcaggcctacaacgatacaaaccgtaggtcagataaggcgtttacgccgcatccgacatgttttccctcaaatcagaacaacagcgccagcccgccgacaatcacaccagacactgccaccatcgcccctgtcagccataaggctttcgccgggaacgctttgcgcagcataatcagactcggcaaactcactgccgggagcgtcatcaacaatgccagcgccggagcggttcccatacctgccagcatcatcgtttgtacaatcggaatttctgctgccgtgggaatgacaaacaagcatcctgctaccgccatcgccaccacccacatcaggctgttatcgacagcaccatcggcatgggggaataaccagacgcgagcggcacccaacaccagtactgcaaggatgtaaaccgggatcgtactccagaaaagcgtccatagcgccctgccccagcggctaaaaaacccgccctgtgcttccggtatgtcaatttcgaccggtgcctgcgtttgcggtgtttcacgcacccatttttgcaccagcgtcgcaatcagcaacaccatcaccagcccggccaccagacgaatcgccgcaaaaccccagccgaggacaaagcccataaacaccagcgtcgccgggtttaacaccggattgcccatccagaatgccagcgcaccgcccatgctcacctgttggcgacgcattcccgccgcgaccggagccgcacagcaggtacacatcatgcccggcaagctaaacagcgttcccagcagcgtgccgcgaaagcggctttgcccaagcgtacgcaacaaccagtcacgcgggatcagcacctgaatcaagctaccgaggatcacccccagcaccgccgctttccataccgcgaggaaatagatcatcgcgtaatccaacgccgcctgccatgggttagcatccgcctgcgcaaggatagatttaccgatactgtgggtttcggcagcagtaaacgctttgccgtagtaaggttcccatttcacataccagagaccggcaatgacaacgagaaagaaaagcgcgggtttccaccactgaatgggcgttgccgcctgagaactagactgaccagtcatagcattccccaggaataagttatgataattgagcgcgtgaatattacgctcactatcaattcttgggaataattattcagctcttttgcgtaattcactagagcttaaaatcgtcacgccttcatgctcaggccgcatgctctctgccagcatgacccgcgccacgtctctcgcatcaatggatttccagttacctggtaacaaacggaacagcggcgcaaaaagcgtttcgttcatccgctgtttgctacgatcgcccagtaacatgctcgggcgagcaatggtcaatttcggccagttctgggcgattaatgcttcttccatctcccctttgacgcggttatagaaaaacgggctgtgggcattggcacccatcgcactgactaccaacatatgctgcgcgcccagtcgccgcccggttaatgcggtatccactaccagcgtgtaatcggcatgaataaacgcctctttgctccccgcttctcgccgcgtggtgccgagacaacaaaacacaatgtcgatgggatcggtgacctgcgccaacgcgtcactcagttgcggatcatggggattaaacaccccgggcatatcgcccaacggacgtcgcgtcggcgcagcaatggcgttaactttcggttcgttaatcaacatccgcagcaggtgaccgcccaccagccccgttgcgcctgtaatcagtacctgactcatcttcgctcctttacagaattgtctgccttgcgctccacggctcatgcaccaggcttaatagaccatgaggtaattatccccgattgtgggaaattcgcctcatccaatgcaacaacgcggaggaagcatgagtaagaaaattgccgttttaatcactgatgaatttgaggatagtgaatttactagtcccgcagacgagttccgtaaagccggacacgaagtgattaccattgaaaaacaagcgggtaaaacggtgaaaggcaaaaaaggagaagccagcgtgaccatcgataaatccatcgatgaagtgacgcctgcggagtttgatgccctgctgctaccgggcggccatagtccggattatctgcgtggggacaaccgttttgtcacctttacccgtgattttgtgaatagtggcaaaccggtgtttgccatctgtcacggcccgcagttgctgatcagcgccgatgtgattcgggggcgcaaactgaccgcagttaaaccgatcattattgatgttaaaaatgcgggcgcggaattttacgatcaggaagtcgtggttgataaagatcagctggttaccagccggacaccggacgatctgccagcgtttaaccgcgaggcgttacgcctgctcggtgcctgattacgcctgctcggtgccactgtcgcgtagccaaatcatttttttaccaaagcccagcgtgttgtcggtgaatttgatttcatcgagccggatttcccacaccggggcgctcagcattctggcaaccggaaagcgacgattgtacgccttgcgcgcgaggtcgctttcctcaccttccagcctgcggatctcacctttaaactgcacaccgcgaattaacgctaccgttttcggctgaccgtttaccgttccggcaaccgcagcctgcggcccactcatctgcgcgtggcgcgttttttcttccgtcaaaatgtagaaggcgactttctgcgcatcaaaaagataaaaggcattagcgcaccagagttccccttcctgctgcacacaccaagtgacaacatgttgttttgccagccaacggctgatggcgatgagtgtttccattgctgttctcttttatactgtgggcctgaccttaacatgcgacgcagacgatgacaccctggtttctttacttgatccgtaccgccgacaataagctttataccgggatcaccacggatgtcgaacgccgctatcagcagcaccaaagcggcaaaggggcgaaagcactgcgcgggaaaggagaactaacgctggtgttttccgcgccagtgggcgatcgtagcctggcgttacgggcggaatatcgcgttaagcaactgaccaaacggcaaaaagagcgtctggtagcggaaggcgcagggtttgcagagctgttaagcagtctgcaaaccccggagattaaaagcgattgaaatgctcgtgatactcaaccaggccggtaacgccattcagcgcgtcatccgctaaacgatgtacctggaaggcgctttcagtgcccggccagcggcaacgcagatcgtgatgcgccgccagttcaaagccgaaacgactgtacagcgccggatcgcccagcgtcaccactgcggcatagccgaactcattaaggctatcgagtccttcatagaccagttggcgtgccagcccctgtccacggtatttttcatcaaccgccaacggtgccatgccgacccattgcaggtcttcgccctgcacatcaaccggactaaatgccacatagccaatgacctgaccttcgtcatctgtcgccaccagccccagcgtcagaaagccatcttcacgcagatcgtgaaccagcttcgcttccgcatcactttcgaaactgcgacgcagcagggcatcaatacccggcgcatcaatgggaatttctactcgaattagcatggttcacctacgcttgtctgtttggtttcaggcgcggttttcattcccgcctcaacaaaatccgccagttgcagcagcatcatgcgtaaggctttcggcatttgctccagttcaatggcgtccatcaggtttttcacatacagccccagctccgtatcgccttcaatcaccagccgacgctggaagaagagcgtatccggatcttgtttacgcgccgcaatcatcagcagatcgctggcgtcggcactaaaactcacatcagcttgcgcgttctggctaacgaccagtttgccattcaccacgctggtaaaccattgcaggtcaatatcacgcacatgaatacttaaccagcggccttcaagaaactccagctcgccatcatccagcgcctggcggaattgccagcttaagacctgctcaagaacctggcgttttagcgcaaatggcgtcagttttaccggtacactcaacagagatggccccaaatgcacaatacgggaacgcagtttatccaacacgagttttactccctgtttcaacaatcatcctattttgccatatcagaaaaataacatagcggtataaatcaacaattccatatgaaattgctgctaccaccaatacaactttaactgccttaaatcaaaaattgtcgcagcaaggttaactaaaatcccagttcgttaacatttttgcgttttgatagcgcaaccttcaggaaaaattatggagctgctctgccctgccggaaatctcccggcgcttaaggcggccatcgaaaacggcgcagatgctgtttatatcgggctaaaagatgataccaatgcccgtcacttcgccggccttaactttaccgagaaaaaattgcaggaagcggtgagttttgtccatcaacatcgccgcaaacttcacatcgcgattaacacttttgcgcatccggacggttacgcccgttggcagcgcgccgtggatatggcggcgcagctgggtgccgacgcgctgatcctcgccgacctcgccatgctggagtacgccgccgagcgttatccgcatattgagcgccacgtaagcgtgcaggctagcgcgaccaatgaagaggcgattaacttttatcatcgccattttgacgttgctcgcgtggtgctgccgcgcgtgttgagcattcatcaggtgaaacaactggcacgggtcacacctgtaccactggaagtctttgctttcggcagcctgtgcattatgagcgaaggtcgttgctatctgagcagctatctgacgggtgagagccccaacaccataggcgcgtgttctccggcccgtttcgtgcgctggcaacaaacgccgcaggggctggaatcccgcctgaacgaagtgctgatcgaccgttatcaggacggcgaaaacgcaggttatccgacgctatgtaaagggcgttatctggtggacggcgagcgctatcacgcgctggaagaaccaaccagtctcaataccctggaactgctgccggagttaatggcggcgaatattgctagcgtgaaaattgaaggccgccagcgtagcccggcgtatgtcagccaggtggcgaaagtctggcgtcaggctatcgaccgttgtaaggccgatccgcaaaactttgtaccgcaaagcgcgtggatggagacgctcgggagcatgtccgaaggcacgcaaaccactcttggcgcatatcaccgtaaatggcagtgagaaaagcaatgaaatattccttagggccagtgctgtggtactggccaaaagagacgctggaagaattttatcagcaggccgccaccagcagcgccgacgtgatttatcttggtgaagcggtatgcagcaagcgtcgggcaaccaaagttggcgactggctggagatggcaaaaagcctcgccgggagtggtaagcagattgtgctctccacgctggcgctggtgcaggcaagttctgaactgggcgaactgaaacgctatgttgagaacggtgagtttctgattgaagccagcgatctcggcgtggtgaatatgtgcgctgaacgcaaactgccgttcgtcgccgggcacgcgctgaactgctacaacgcggtgacactgaaaatattgctcaaacagggcatgatgcgctggtgtatgccagtggagctttcccgcgactggctggtgaatctgcttaatcagtgcgatgagctgggcattcgtaaccagtttgaagtggaagtcctgagctacggtcatctgccgctggcctactccgcccgctgctttaccgcgcgtagcgaagaccgcccgaaagatgagtgtgaaacctgctgcattaagtatccgaacgggcgcaacgtgctgagccaggaaaaccaacaagtgtttgtactcaatggcattcagaccatgagcggctacgtttacaacctcggtaacgagctggcatccatgcagggcctggttgatgtggtccgcctgagtccgcagggtactgacactttcgcgatgctcgacgccttccgcgctaatgaaaatggcgctgcaccactgccgttgacggcgaacagcgactgtaacggctactggcggcggctggcaggactggagctgcaagcctaagtaaatagctcactttgttaacaactttaactactctttaatgcagtattaaagattaatcggtaacaaagtgagctgttatgactgataaaaccattgcgtttagcctactcgatctggcccccattcccgaaggttctagtgcgcgagaagcattctcccactctctcgatctcgcccgtctggctgaaaagcgcggctatcatcgctactggctggcagaacaccacaatatgactggcattgccagtgctgccacgagcgtattgatcggctatctggcggcgaataccaccacgctgcatctggggtctggcggcgtgatgttgcctaaccacagtccgttggtcattgcagaacagttcggcacgcttaatacactctatccggggcgaatcgatttggggctgggtcgtgctccgggtagtgaccaacggacaatgatggcgctacgtcgtcatatgagcggcgatattgataatttcctccgcgatgtggcggagctggtggactggtttgacgcccgcgatcccaatccgcatgtgcgcccggtaccaggctatggcgagaaaatccccgtgtggttgttaggctccagcctttacagcgcgcaactggcggcgcagcttggtctgccgtttgcgtttgccagtcacttcgcgccggatatgctgttccaggcgctgcatctttatcgcagcaacttcaaaccgagtgcacggctggaaaaaccatacgcgatggtgtgcatcaatattatcgccgccgacagcaaccgcgacgctgaatttctgtttaccagtatgcagcaagcctttgtgaagctgcgccgtggcgaaaccgggcaactgccgccgccgattcaaaatatggatcagttctggagtccgtctgagcagtatggcgtgcagcaggcgctgagtatgagcttggtaggtgataaagcgaaagtgcgtcatggcttgcagagcatcctgcgcgaaaccgacgccgatgagattatggtcaacgggcagattttcgaccaccaggcgcggctgcatagctttgagctggcgatggatgttaaggaagagttgttgggataatgtgtcttaacgcgggaagccttatccgagctggcaacgctgtcctacatagacctgataagcgaagcgcatcaggcattgtgtaggcagcagaaatgtcggataaggcaccgctgattactgatacaccggcagtaaattaaagctgcttaaaatatgcaccagtgcgttgccgacgccaaacaccagaatcagcgcaatcatcggcttgccaccccagacgcggaatttcgggctgccaaagcgtttacggcttgcacgggctaacagcgccggaacaattgccgcccagatggtagccgctaaaccagcataaccaatggcgtacaggaatccgttcgggaacaacagcccccccacaactggcggggcaaaggtcagcaatgccgttttcaagcggcccacagcgctgtcgtcgaaaccaaacagatctgccagatagtcaaacaaacccagcgttacgccgaggaagctactcgctaccgcaaagttactgaacacgaccagcagcagatccagactacggctgttcagtacgccgcttaacgcctgtaccagcacatcaatattaccgcccttctctgcaataccgataaactccggacgcgggatgttacccatcgtcgccagcaaccagatggtatacagcgccagcgccatcagcgtaccgtacaccagatatttcacgatggttttcggatctttgccgtaatacttcatcaggcttggcacgttaccgtgataaccaaagcttgccagacagaacggcagggtcatcaacagatacggtgcataagacgcattgctttcggcgacgttgaacaatgtcgcaggctgcacatgccccagcaggctaccaaaggtgaggaagaaggtaatgactttcgcccccagcacaatcgctgtcatgcgactgacggctttagtgctcaaccacaccacaaacgctaccagcaatgcaaaaccaaaacccgccgcccgtgccgggacgtttagactcatctctgcgaaggtgtgatgcagaatgctaccactggcagaaatataggcataggtcaggatatagagcacaaaggcaatggaaatgccgttgaccacgttccagcctttgcccagcaaatctttggtgatggtgtcaaaactgctaccgattctgtaattcaggttagcttccagaatcatcaagccggaatgcagcatacagaaccaggtaaagatcagcgccgccatactccagaaaaaccacgccccggacatgaccactggcagagaaaacatccctgcgccaataatggtgccgccgataatcaccacgccgccaagcaggctcggactcgtttgggtggtggttagtgttgccatgagggcttctctccagtgaaaaatagtgcgactgcgttgttatgcattgcactgtaccagtacacgagtacaaaagacagaaaaaaagccccgatggtaaaaatcggggctgtatatattattttacagattgtgttcgctgttcagcgatgattacgcatcaccaccgaaacgacgacgaccggtagaatcatcacgacgcggagcgcggccttcacgacgttcgccgctaaaacgacgaccatcaccacggccaccttcacggcgttcaccgctgaagttacgaccgccttcacgacgttcgccaccgaaaccacgaccaccgccacgacgctcaccgccagtatgcggctgtgcatcgcccagtaactgcatgttcatcggcttgttgagaatgcgagtgcgcgtaaagtgttgcagcacttcacccggcatacctttcggcagttcgatggtggagtgagaagcaaacagcttgatgttaccaatgtaacggctgctgatgtcgccttcgttagcaatcgcaccaacgatatgacgaacttcaacaccatcatcgcggcccacttcaatgcggtacagctgcatatcgccaacatcacgacgttcacgacgcggacgatcttcacggtcaccacgcgggccacggtcgttacgatcgcgcggaccacggtcatcacggtcacggaattcacgtttcggacgcatcggcgcatctggcggtacgatcagagtacgttcaccctgtgccattttcagcagtgccgcagccagagtttcgagatccagctcttcaccttcagcagtcggctgaattttgctcagcagtgcgcggtattgatccagatcgctgctttccagctgctgctgtactttagcggcgaatttttccagacggcgtttgcctagcagttctgcgttcggcagttctacttccggaatagtcagcttcatagtacgttcaatgttgcgcagcagacgacgctcgcggttctcaacgaacagcagcgcgcggccagcacgacccgcacgaccggtacgaccgatacggtgaacgtaagactcagaatccatcgggatatcgtagttaactaccaggctgatacgctcaacgtccaggccacgggctgcaacgtcggtcgcaatcaggatgtccagacgaccatctttcaggcgttccagtgtctgttcacgcagcgcctggttcatgtcaccgttcagcgcggcgctgttgtagccgttacgctcaagagcttcagccacttccagagtcgcgtttttggtacgaacgaagataatcgccgcatcaaaatcttccgcttccaggaaacgtaccagtgcttcgtttttgcgcataccccagacagtccagtagctctggctgatgtcaggacgggtagtcacgctggactgaatgcgcacttcctgcggctctttcataaagcggcgggtaatgcgacgaatcgcttccggcatggttgcagagaacagagcggtctgatgaccttccgggatctgcgccataatggtttcaacgtcttcgatgaagcccatgcgcagcatttcgtcagcttcatccagaaccagaccgctcagtttagagaggtccagagtgccacgtttcaggtggtccagcagacggcccggagtaccgacaacgatctgcggcccctgacgcagggcgcgtaattgcacgtcataacgctggccgccgtacagagcaaccacatttacgccgcgcatgtgtttagagaaatccgtcattgcttcagcaacctgtaccgccagttcgcgggtcggtgccagcaccagaatctgtggtgctttcagctcaggatcaagattctgcaacagaggtaaagagaatgctgcagtttttccgctccccgtctgggccatacccagaacgtcgcggccattcagcagatgtggaatacactctgcctgaattggagatggtttttcgtaacccagatcgttaagggcttcaaggataggagccttcaggcccagatctgcaaaagtggtttcgaattcagccatgtagtacgtgtgcctcaaaattaatggcggccagtctacataactcatcatgaaattgatcagcaattttcattgaaaagtgtgaaccggctcaaagtaggtgtattaacgaacaacaacgccctcacccgttaaggtgatggcaatcaaaaaagattacgggctgatgtgtacgtcagttattgctggtcgctttctgccaggtcatcttggtcctggcccaggaggcttaattccaacaatgcgtatcggtgctcaacaaagttatgaacgttgttggcaaccgccagtttgaacagtgccgtggcgctgtccaaatcccccagacttaggtagtacttacctaaatagaagttggtttcactgagatgctcagcgaggctggtgttatccgttgcgtccgccttgagcctttccattaacgtttgttcgctaatgttgcccaggtagaactcgacaatgttccatccccactgttccttatcgcttttttcgaagtgctgtttcaacacttctttagcctgcttctcatcgagcttctgctcggcgagataaagccacagactacggaaaggatcattgggatcgtcttgataaaacgccagcagatcatcttgcgctaacttgtcacgaccgccgtaatataatgcgatcccgcgattcaagtgcgcgtagttgtaagttggatcaagctcaagtacagaatcaaacgcttcataggcagcatcaaaattgcctgcctgcgttaaatatatgcctaagtaattgaatacttcaggcatatccggtcggattgccagcgcttggctaaaatcgttacgcgctaatgccctcagaccgagactatcatacaacactccgcgctcatataaaagctgtgcgcgttcgtcatcggttaaagcccgactggcaaggatttgttccatacgtgccagaatcacttcctgctgtaaagtcggttgcaatggtaccgcgaggacttcacttttacgccaggaagtattactgcatcctgcaagcgtaagtgctgtcgcaacgaaacaccagcgcaaaaaaggcttcatttcccactcccgaagaccacggttgaatgaacgtcctgttcccggttgctaacaaggcgtcctgcccggttaaaagccccccgccgcagcggagggcaaatggcaaccttactcgccctgttcagcagccggagcttccggtgctgcagcaggttgagactgctcagtcgcttctttaatgctcagacggatacggccctggcgatcaacttccagaactttcaccggtacttcctgacccatctgcaggtaatcggtcactttctcaacgcgtttgtcagcgatttgagagatgtggaccagaccttctttaccgccgccgatggcaacaaatgcgccaaagtcaacgatacgggtcactttaccagtgtagacgcggcccacttcgatttctgcagtgatctcttcgatacgacgaatagcatgtttcgctttctcgccgtcggtcgctgcaatcttcacagtaccgtcatcttcgatttcgatggtggtgccagtttcttcggtcagagcacggattacagaaccgcctttaccgataacatctttgatcttgtccgggttgatcttgatggtatggatacgcggtgcgaactcagagatatcgccacgcggcgcgttgatcgcctgttccattacgcccaggatatgcagacgcgcacctttagcctggttcagcgcaacctgcatgatctctttggtgataccttcaattttgatatccatctgcagtgcagagataccgtcgcgggaacctgcaactttgaagtccatatcgcccaggtgatcttcgtcgcccaaaatgtcagacagtacaacgtagttgtcgccttctttcaccagacccattgcgatacccgcaacggcagctttgatcggcacacctgcgtccatcagcgccagagacgcgccgcacacggaagccatagaagaggaaccgttggattcagtgatttcagacacaacacgtacggtgtacgggaatttgtccatatccggcatgactgccagcacgccgcgcttcgccagacgaccgtgaccaatttcacgacgcttcggagaaccgaccatgccggtttcgcctacggagtacggagggaagttgtagtggaacaggaaggtatcggtacgttcgcccatcagttcatcaagaacctgcgcgtcacgagcagtacccagcgttgcggtaaccagcgcctgcgtttcaccacgggtgaacagcgcagaaccgtgagtacgcggcagcacgccagtacgcacatccagaccacggatcatatctttttcacgaccgtcgatacgcggttcgcctgccagtacgcggctacgaacaacgtttttctcgatcgcgtgcagaatttcacccagttcgttttcgtccagggtttcgtcttcagcaagcagcgtcgcgatggtttcagatttgatgacatcaacctgcgcataacgctcttgtttgtcggtgatgcggtaagcatcgctcaggcgagcttcagccagtgcagcaacgcgcgcgtttagcgcttcgtttaccggctccggctgccagtcccaacgcggtttaccggcttctttcaccagttcattgatgttctgaataacaacctgctgttgttcatgaccgaacactactgcgcccagcatctggtcttcgctcagcagttgagcttcagattcaaccatcagtacagcggcttcagtaccggcaacaaccagatccagtttgctctctttcagctcgtcctgagtcgggttcagtacgtactggtcattgatgtaacctacgcgggcagcaccaatcgggccattgaacggaataccagacagagacagcgctgcggaagcaccaatcatcgcgacgatatccgggttaacttgcgggttaacagaaaccacggtggcgataacctgaacttcgttgacgaagccttccgggaacagcgggcgaatcgggcggtcaatcagacgcgcgatcagggtttcgccttcgcttgggcggccttcacgacggaagaagctacccgggatacgaccagcagcgtaggtacgctcctgatagttaacggtcagtgggaagaagtcctgacctggtttggcttttttctggccaacaacggtaacgaataccgcggtgtcatccatgctaaccataacagcggcagtagcctgacgagccatcatgccggtttccagagtcacggtgtgttggccgtactggaatttacgaacgatcggattaagcaatgtaatatcctttctctttcttagacagtaccttacggcactggtgttaataccgcttcttctgcgcatcctcgcgactaatgacaaccctaacccagctctatgtgggtaaagcctctcattagccgcgcgaacctctgcaacggaagatcattcatagcaacaatacattagtttccagtgaattgctgccgtcagcttgaaaaaaggggccactcaggcccccttttctgaaactcgcaagaattagcgacgcagacccaggcgctcgatgagctgggtgtaacgtgctacgtctttacgtttcaggtagtcgagcagtttacgacgctgagaaaccatgcgcagcagaccacgacggctgtggtgatcttttttgtgctctgcaaagtggccctgcaggtggttgatctgtgcagtcagcagtgctacctgaacttcggtagaaccggtgtcgtttgcgtcacgaccaaactcagaaacgattttagctgttgcttcagtacttagagacattttaaaactccaaagtatatagaatgaaaggacgccgatctctaattcagcgatcccagtgtacgttacgcaaagtgttaaacaatttacgcgacgttaagcggcagtattctactcgtagcgacctgttatcgcaagacggttaacattacgccgggtattcaaccaccaggcgacgaggcgcaacgcggccttcatcgtcaatttcgcccataccgataaatttgccgttctcaccttccgtgacgcgaaccagtccttccagtggcgcaccagatgtacgaaccgggttaccatttttgaagtaaacagaagacgttaacggaagattcaccaccggatagtcgctagctggactgtccattggcatcagtaatggatcaagtaactccgcggctggaatatcctgctgttcagcttgctcaacaagttcacgcaggtgctccagggtcaccatccgttcaaccggatatttacttaccgccagacggcgcaggtaaataacatgcgcgccacagccgagtttttcacccaggtcatcaatgatggtgcggatataagtgcctttactgcagtgaatttccagctccagctcattgccttcatggcgaataaacagcaattcataaacggtaatcggacgcgcttcacgcggaacttcaatgccctgacgcgcatattcgtacagttttttgccctgatatttcagtgcactatacatgctagggatctgttcgatatcgccacggaaagtatccagtgccgctgccagctgctctgcgctaaaggttaccggacgttcttcaacgatctgtccgtcggcatcagaagtatcggtacgctgtccaagacgcgcaatgacccgatagcgtttgtcggagtccagcagatactgggaaaacttcgtcgcttccccgaggcaaatcggcaacatgccggtcgccagcgggtccagcgcaccggtatgcccggcacggttggcgttatatatacgtttcactttttgcagcgcatcgttgctggacataccctgaggtttatccagcaacaaaacgccgttaatgtcgcgaccgcgacgacgaggacgactcattagtcctccttgctgtcgtccgggttaacacgacgttcttcgtcatgtttgaccacgctggtcaccaggttactcatgcgcatcccttcaaccagagagttgtcgtagaagaaggtcagttccggcacgatacgcaggcgcatcgctttccccagcaggctgcggatgaaaccagaagcttcttgcaacgctttgatgcccgctttaaccgcgtcttcatctttgtcgttgaggaacgtcacatatactttggcatacgccaggtcgcgagacatttcgacaccggaaacggtggtcatcatgcccaggcgaggatctttaatttcacgctgcaggatgagagcgatctctttttgcatttcctgcgctacgcgctgcgggcgaccaaattctttcgccataataaattctcctgacaaaaaaggggctgttagcccctttttaaaattaatttcaggtggaagggctgttcacgttgacctgataagacgcgccagcgtcacatcaggcaatccatgccggatgcagcgtaaacgccttatcccgcatggaaccctaaaaaccttaagcaatggtacgttggatctcgatgatttcgaatacttcgatcacatcgccagtgcggacgtcgttgtagttcttaacgccgataccacattccataccgttacggacttcgttaacgtcatctttgaagcggcgcagggactccagctcgccttcgtggataaccacgttgtcacgcagaacgcggatcgggttgtgacgtttaaccacaccttcggtaaccatacagcctgcgatggcaccaaatttcgggcttttgaacacgtcacgaacttccgccagaccgataatctgctgtttcagttccggagacagcataccgctcatcgccgctttcacttcgtcaatcaggttatagatgacggagtagtaacgcagatccaggctttccgcttcaatcactttacgtgcagaggcatcagcacgtacgttaaagccaaccaggatggcgttggacgccgcagccagggtggcgtcggtttcggtgataccacctacgccagaaccgatgatcttcactttaacttcgtcagtagacagtttcagcaaggagtcggagatcgcttcgacagaaccctgtacgtctgccttcaggacgatattcacttcgtgaacttcgccttcggtcatgttggcgaacatgttctcgagtttagatttctgctgacgcgccagtttaacttcgcggaatttaccctgacgatagagtgcaacttcacgcgctttcttctcgtcacgtacaacggtaacttcatcacccgcagccggtacgccggacaggccgaggatttccaccggaatggacggacccgcttccagcacttcctgacccagttcgttacgcatcgcacgaacacgaccgtattcgaagccacacagaacgatatcgcccttgtgcagagtaccttcacgtaccagaacggtagcaaccggaccacgacctttatcgaggaaggattcgataaccgcaccgctcgccatacctttacgtaccgctttcagctccagaacttccgcctgcagcaggatagcgtccagcagttcatcgataccggtacccgctttcgcagatacgtgtacgaactggctttcaccgccccactcttccggcaggatgccgtactgggagagttcgttcttaacgcgatccggatcagcttctggtttatcgatcttgttcactgcaaccaccaccggtacctgcgccgctttcgcgtgctggattgcttcgatggtctgcggcatcacaccgtcgtcggcagcaacaaccaggactacgatgtccgttgcctgcgcaccacgagcacgcatactagtaaacgcggcgtgccccggggtgtccaggaaggtgatcatgccgttttcagtttcaacgtggtatgcaccaatgtgctgggtaatgccgcccgcttcgccagaggccactttcgtactacgaatgtagtccagcagagaggttttaccgtggtcaacgtgacccatgatggtcacaaccggcgcgcgcggttcagccgcagcacccgtgtcacggtcgctcattaccgcctcttccagctcgttttcacgacgcaggataactttatggcccatctcttcagcaaccagctgtgcggtttcctgatcgataacctggttgatggttgccattgcgcccagtttcatcatcgctttgatgacctgagagcctttaaccgccatcttgttcgccagttcgccaacggtgatagtttcgccgatcacaacgtcacggttaacggcctgagcaggcttctggaagccttgctgcaggctagaacctttacgttttccgcctttaccgccacgtactgctgcgcgtgcttcttcacgatcagctttactttcagcgtgtttgttgcctttcttcggacgcgctgctttcgcgttacgaccacggccacggccgccttcgacttcacgatcgctttcgtcttctgcctggcgagcatgttgagaagtagtgacgtgataatcgctggaatcttcagtcggttccgcgttatcagtccatttgttttcttccgccatacgacgtgcttcttcagcaacgcgacgtgcttcttcttcgagtttacgacgcgcttcttcttcagctttacgcttgagctctgcagcttcctgctcacggcgggctttttcagcctgggcgtttttagtcatatcgtcttgttgattgctcactttgtctttttccgcagcttcacgtttcgcttgttcagcagcttcacgcttagcttgttctgcggcctcacgttcagctttttgttgcgcctcgcgtttagcgctttcttctgcctcacgacgggcttgctcttccgcttcacgctgcgcttgctcttccgctgcaaggcgttcagcctcttgcggatcgcgtttcacaaaggtgcgtttcttgcggacttcgatttgtacgcttttgctttttccaccggtaccaggaatgttaagggtgctgcgtgttttacgttgcagcgtcaatttgtccgggccactatttttctgattcaggtggtcaatcaaagtctgtttctcttgtgcagacacagagtcgtcagcagacttccggatacctgcatcagcaaattgctgtaccaggcgttccacggaggtctgtcgctctgcggccagcgttttaatcgttacatctgtcatgctgttccttcctgctacagtttattacgcttcgtcaccgaaccagcaaatattacgggcagccataatcagtgctccggctttttcgtcggtcaacccttcgatatcagccagatcatcaatgccctgttcggcgagatcttccagcgtacaaacgccacgggcggccagtttgaatgccaaatcacgatctaccccttcaaggttcagcagatcgtcagccggtttgttatcaccgaggctttcttcctgggcctgtgcaatggtggccagtgcatttttagcacgctcgcgcagtgcttcaacggtcggctcatcaaggccttcgatttccaacagctctttcatcggcacataggccaattcttccagcgtgctgaagccttcttctaccagaacagtcgcgaagtcttcgtcgatgtcgagatatttggtgaaggtgtcgatcgctgcgtgcgcttccgcctgatgcttagcctgcaggtcgtcaacggtcatcacgttgagttcccaaccgctcagctggctagccagacgcacgttctgaccgttacggccaatcgcctgcgccaggttaccggcttcaacggcgatatccatggtgtgtttatcttcatccaccacgatagaagcaacgtctgccggtgccattgcgttaatcacgaactgcgccgggttatcatcccacaggacgatatcgatacgctcgccacccagttcagtagacaccgcctgaacacgcgcgccacgcatacctacgcaagcacctaccggatcgatacgtttatcgttggttttcaccgcgattttcgcacgagaacccggatcgcgagccgctgctttaatttcaatcacttcttcgccgatttctggcacttcaatacggaacagttcgatcagcatttccggcttggaacgagtgacgaacagttgcgcgccacgcgcttccgggcgaacggaatagagcacgccacgaacgcggtcgccagggcggaagttttcacgcggcagcatatcttcgcgcaggatcacggcttcagcgttgttgcccagatccagagagatgttgtcgcggtttacttttttcaccacgccggtgatgatttcaccttcgtgttcacggaactgatcaaccaccatcgcacgttcggcttcacgcactttctgcacgataacctgttttgccgtctgggtagtgatacggtcaaaggtaacagactcaatctgatcttcaacgtaatcgcccaggttcaggctttcatcttcataacgtgcggcttcaagggtgatttccttggtcggctgggtgacttcatcaacaactaaccagcgacggaaagtgtcaaaatcaccgcttttgcgatcgatctgtacgcggacgtcgatctcttgttcatattttttctttgttgctgtcgccagcgcgctttccaatgcttcgaaaatcttctcgcgaggtagcgccttttcattggatacggcttcaactacagccaaaatttctttgttcatcgcgggcttttcacctcatccagactattaaaagtggggaaccaggttcgccttctggatattactcagcgcgaacacttcatctttaccttcgacggtaactgtgatcatttcaccgtctaccgctttgataacgccctgccatttacgacggttttgtaccgccatacggagaaccagagtcacctcttctccgacaaaacgggcgtagtgttcagccgtgaacagtgggcgatcgagacccggactggagacttccaggttataagcaacggtgatgggatcttcaacatccagcacagcacttacctggtggctcacatcagcacaatcatcaacattgatgccatcttcactatcaatatagatgcgcagtgtggatgtgcgaccgcgaataaattcgatgccaaccagttcaaaacccagggcctcaactggcgcagtaatcatctctgttaatttttgctctaatgtggacaagcccacccccaagacataaaaaaagggcctaaagcccagttattctgtagtcagataacaaaaaaccccgataaatcggggctttatataactgaaccctataaccgcaactgcggtctggagcactttccagaaggattttttcaaatcccactacgaaggccgaagtcttcacagtatatttgaaaaaggactctaagggaaagtggttgcgggggccggatttgaaccgacgatcttcgggttatgagcccgacgagctaccaggctgctccaccccgcgcctgaaacgtggcaaattctactcgttttgggtaaaaaatgcaaatactgctgggatttggtgtaccgagacgggacgtaaaatctgcaggcattatagtgatccacgccacattttgtcaacgtttattgctaatcatgtgaatgaatatccagttcactttcatttgttgaatacttttgccttctcctgctctcccttaagcgcattattttacaaaaaacacactaaactcttcctgtctccgataaaagatgattaaatgaaaactcatttattttgcataaaaattcagtgagagcggaaatccaggctcatcatcagttaattaagcagggtgttattttatgacgacgattctcaagcatctcccggtaggtcaacgtattggtatcgctttttctggcggtctggacaccagtgccgcactgctgtggatgcgacaaaagggagcggttccttatgcatatactgcaaacctgggccagccagacgaagaggattatgatgcgatccctcgtcgtgccatggaatacggcgcggagaacgcacgtctgatcgactgccgcaaacaactggtggccgaaggtattgccgctattcagtgtggcgcatttcataacaccaccggcggcctgacctatttcaacacgacgccgctgggccgcgccgtgactggtaccatgctggttgctgcgatgaaagaagatggcgtgaatatctggggtgacggtagcacctacaaaggaaacgatatcgaacgtttctatcgttatggtctgctgaccaatgctgaactgcagatttacaaaccgtggcttgatactgactttattgatgaactgggcggccgtcatgagatgtctgaatttatgattgcctgcggtttcgactacaaaatgtctgtcgaaaaagcctactccacagactccaacatgcttggtgcaacgcatgaagcgaaggatctggaatacctcaactccagcgtcaaaatcgtcaacccgattatgggcgtgaaattctgggatgagagcgtgaagatcccggcagaagaagtcacagtacgctttgaacaaggtcatccggtggcgctgaacggtaaaacctttagcgacgacgtagaaatgatgctggaagctaaccgcatcggcggtcgtcacggcctgggcatgagcgaccagattgaaaaccgtatcatcgaagcgaaaagccgtggtatttacgaagctccggggatggcactgctgcacattgcgtatgaacgcctgttgaccggtattcacaacgaagacaccattgagcagtatcacgcgcatggtcgtcagttgggccgtctgctgtaccaggggcgttggtttgactcccaggcgctgatgctgcgtgactctctgcaacgctgggttgccagccagatcactggtgaagttaccctggagctgcgccgtgggaacgattatagtatcctgaataccgtcagtgagaacctgacctacaagccagagcgtctgacgatggaaaaaggcgacagcgtgttcagcccagatgatcgtattggtcaattgaccatgcgtaacctggatatcactgatacccgcgagaaacttttcggttatgccaaaactggcctgctttcctcctctgccgctagtggcgtgccgcaggtggagaatctggaaaacaaaggccagtaattcgacatcaaccctgcccttcaggggtggggttaccttgcttatcctctgtaaactcctttctgagcatcacataatcgaaaacatcatggtttgcatccacaacccgactgtctcctttatagtgtgcaatcacttcctcaagcgtttgcggctgttccggctttgttacccccatccacgcattaataaggtaattattgtaagctgtgctaaagatgttgttttccgttgtgcgatccacgccatccccaagaacggggctataccagataaacatcgggacatgatatgcctgctggctagcctccctgcctccatgaaaatagacgttcttcttcgtagggtcacgttccaggccgtggtcggcaaaatacatgacgctggcgcggcgatcttttaataattcaaaaacctgacctagcaaactatctgtgtaatgaatggagttgtcatagcaggcatcctgatcgtcctgcggttgaaacacggcgctggattgcggataggcgctacaagccggttcatggcttccatttaaatgaagaacaatcagtttcttttgctgcgtattttgctgtaatgcttggcttaaatgcggcaacaacaattcatcaaatcctctgacataaactgtttccatggcgcgcatggcgatactggtaactgctgtaccattctgccgaaaagcggattggctgcttagccagaaagtctgaaatcctgcttgattagccatattaataatgttgtcggggtaattatgaatgtcatgactcaaaacagaatcagcagttaaagaaaggggaacgctcagcgcagtgtaaggtgcgccgcttattgcttgattaaacagtttgatctgttttctttgtgcttcaacttgcggtgtcgtagagcgtgtatatccatacaaagacatattgtcgacacgtacagactcccccacaatcaacacgtaggtatcaatacctgtatccctgacacttaattgaaaatacggcaccgtgtttgcaatactgagtaatctttgatgctctttcgctgctaaagcaaaatagttgagattgaaaaacggcgtataggtagcaaatcggctcgctagtatatatggactgaacgcttttttattttttgcatctttataagcaaattgacaagcggaaaataaactgccgctaatgacaatcagcaataatattcctgtcactttttttgtcggcaaggaaacatcatattttattattactgccaaaaaaagaagggataaaaaagcaaaggcacatagataagggatatacatccccagcattttgacaacttcatccggatcactctggagcacactaatcgcaaatccatcattgaaagttgtaccaaaggtacaccaactatagaggctaatactcatgtctgccgcagtcagtaacacaaatggtgcggcaacaagcaggcgaagcggaagggaacttatacgttttacaaccaggatggtcagaacgaagaacagcaagcgctgaaccatatgcgctccggaagaagcgactaagttcgtaataccaaaaacaataacacaaagatacaacaaccaatgagatttaaaagttctagcaaatttgttgaatactgtcatccagaaatccaagttcacaaccaatataaacaattatcaacaatgtttaattttatatcagacatgtttttcaactctgatccatatcagaacgaaacactgttagttttttctttttaaatgatgcggccattgcgttctcagtaattaaataacattatcaatgcgtctctaaacattacgcagaacgtagccatcagtcgttatactgacaggagcaggatggtttatcgagaagtaaacatatccgtattcgtaccggaactggagttgacacaataaagtgccaattatgtcagtagaagggaaaaatttataactaaggcgtaccggcaccatcgtttcaaggtaccagctacgagtaaagcaactggacgagatacagatacctgacaaccattcctcagaccaggaccaaaacgaaaaaagacgcttttcagcgtctcttttctggaatttggtaccgaggacgggacttgaacccgtaagccctattgggcactaccacctcaaggtagcgtgtctaccaattccaccacctcggcacggatactactttttagttcgggatatcgctggtcggcttagccggagcagctggctgagtttgttcggttttcgccggtgcactcagattttcccattcgctacctttattggttttgttgctattgatgttacccagcaccagactgatgatgaagaataacgttgccagcagcgccgtcatgcgggtcatgaagttaccagaaccactactaccaaacagcgtagcggaagcgcctgctccgaaggaggctcccatatcagcgcctttaccttgctgcagcatgatcagaccaacaaggccaattgccacaataaggaaaactactaaaagagcttcatacataatcaacctgttccttgcggagttgccgcgtaccaatgcttcaaccaataaagcgggagtttttaatcttccccactgaagcgggtgtgaatactaaccaaagcgaatgaccttcgcaagggcaattttatcgcattgtatcaactgcggaaaaaaacagcaaaaccgatgtgttcgctgagaaaaaaggcgacaatcgccgcctttttagccagttatctaacgctttaaacggcttttactgcatcggcgatgcggtgtgcaaattcagtcacctgcgcttcgtcttcgccttccaccatcacgcgaattaacggttcggtgccggatttacgcagcaacacgcgtccacggttgcccagcgcagcttcaacctctgcggtcacggctttaacactctcatgctcaagtggatcgccgctacctgcggtgtaacgtacgttaaccagaatctgcgggaacattttcatgccgctgcaaaggtcgtgcaggctcatatggttacgtgccatcgccgccagcacctgcaagccagcaacgatgccgtcaccggtagtagttttatccagcaggatcacatgaccggaattctctgcaccgatacgccagcctttctcctgcattttttccagtacgtagcggtcacccactttcgcgcgcgcaaatggaattcctaactgtttcagcgccagttcaagccccatgttgctcatcaatgtacccacagcgccaccacgcagctggccctgacgaagaccttcacgcgcgatgatatacatgatctgatcgccatcgactttattgccttcatggtcaaccataatcacgcgatcgccatcgccgtcgaaggcaataccgagatccgctttttcagccagcacacgagcctggagcgcgcgaacgtcggtagcccccacttcggcattgatgtttacaccgtttggctcacaaccgatagcgataacgttcgcccccagttcgcgcagcacgttcggcgcgatgtgataagtcgcaccgtttgcacaatccaccacaatcttcagttcactgaggctaagttcgttcgggaacgtggctttgcaaaactcgatatagcgacccgcggcatcaacgatacggctggctttacccagttctgcgctatcaacgcagctgatctccttttccatttccgcttcgatggcctcttctaccgcatccggcagtttggtgccgtcgatagagaagaatttaatgccattatcgtagaacgggttatggcttgcagatatcacaattccggcctctgcgcggaaggtacgcgtcagataagccacggccggtgttggcatcgggccagtgaagagtgcggaaaggcccgctgccgccagacccgcttccagtgcactctccagcatatagccagaaatacgcgtgtctttaccaataataatcttacgggagccgtggcgcgccagcactttacccgcggcccaacccagcttaagcacaaaatcaggtgtgatcggcgcatcccctacacgaccacgaatcccatcggtaccgaaatatttacgattactcatagcgtttgttttcctttgcagacagagtggcttccaccacccgcatcgcttctacggtttctttgacgtcatgaacacgaatgatgtgcgcgccttgcattgcggcaatgaccgcacaggccagactaccgctcaggcgctcggacggccccacgttcagcagctgcccaatcatgctttttcgactcatacccaccaacagcggcaggttgaaatggtgaaattcagccaggcgcgccagtaaactatagttatgggagagatttttaccgaaaccgaatccggggtcgagcaacaatttctcttttgcgatacccgcctgctcgcaacgtgctatttgctcaataaagtagcgattcacttctgcaaagacatcgtcatacttcggagcttcctgcatggtttttggatttccctgcatatgcatcagacaaaccggtaaaccggtttctgcagccgcctccagagcgccaggttcggaaagggagcggatatcattaataatgtgagcgccaactttcgcactctcacggatgacttctggtttggatgtatcgacactgatccagacttcgaagcgttgagcaattgcctcaaccacaggaataacacgttgcaactcttcttcaacgctaacttccgccgcccctgggcgcgtggactcgccaccaacgtcaatgatcgtcgcgccagcgttgatcatcagattcgcatgtttcaccgcatctatcaggctgttatgcgtgccaccatcgctaaaggaatcaggcgtgacgttgaggatccccattacgtgaggatggctaaggtccagactagtaccctgggcaaagagtttcatgatgttatccctggtatgaattgataagaaaaaaccccggagcacgccccggggttttcggtacaaatacagtcatctgatgcgggaacttacttgtcgcctaactgctcactcatggtgttacccgggttcggcgtacgcggttcatcaaccggacgaggagcctttggactaccattgtcgccagaattgttagaagcgcctggttcttcccagcccgctggcggacgtacatcgcgacgtgccatcaggtcatcaatctgcggtgcgtcgatagtctcatatttcatgagagcatctttcatcgcatgcagaatatccatattgtcggtcagaagctgacgcgcacgattatagttacgctcaatcagtgctttcacttcctggtcgatgatacgtgcagtttcatcggacatatgtttcgctttcgctacgctacggccgaggaacacttcaccttcttcttccgcgtacagcagtggacccaatttctcagagaagccccactgagtcaccatgttacgtgccaggttggtcgcaactttaatatcgttggacgcaccggtagatacatgttccggcccgtagatgatctcttctgccagacgaccaccgtacagcgtagaaatctggctttccagtttctgacggctggcgctgattgcgtcgccctcaggcaagaagaaagtcacacccagcgcacgaccgcgtgggataatcgtcactttgtgcaccggatcgtgttccggcaccaggcgaccgataatcgcatgacccgcttcgtggtaagccgtgctttctttctgcgcttccgtcatcaccatggagcgacgttccgcacccatcatgattttgtctttcgctttctcgaactcaaccatgctcacaacgcgtttgttgccacgagcagcgaacagtgccgcttcgttcaccaggttcgccaggtcagcaccggagaaaccaggagtaccacgggcaatgattgccgcgtcgatatcgggtgccaatggtacgcgacgcatgtgaactttcaggatctgctcacgaccgcgaacatctggcaagccgaccacaacctgacggtcgaaacggccaggacgcagcagggccgggtcgagaacgtccggacggttagtcgcggcgataacgatgataccttcgttaccttcgaagccatccatctcaaccagcatctggttcagagtctgttcacgttcatcgtgaccaccgcccagaccagcgccacgctggcggcctacggcgtcgatttcatcgataaagatgatgcacggtgccgctttcttcgcctgttcgaacatgtcacgaacacgggatgcacccacaccgacgaacatttctacgaagtcagaaccggagatagtaaagaacggaactttcgcttcgcctgcaatcgctttcgccagcagcgttttaccggtacccggaggaccgaccatcaagacgcctttcgggatcttaccgccgagtttctggaagcggctcggctcgcgcagatactcaaccagttcagcaacttcttcttttgcttcgtcgcagcccgcaacgtcagcaaaggtcgttttgatctgatcttccgtcagcatgcgcgctttgctcttaccaaagctcatggcacctttgccaccgccgccctgcatttgacgcatgaagaagatccagacaccaatcagcaacagcatcgggaaccaggagatgaagatagaagccagcaggcttggttcttcaggcggttcaccgacaaccttgacgttcttggtcaacaggttatccagtaatttcggatcctgaaccggaatgtaagtggtataacggttactatctttcttggtaacgttgatttcacgtccgttgatacgcgcttcacgaacctggtcgttattgacctcttgtaggaaggtagagtaatccaccttacggccattagactcgctgggcccaaagctctggaatacactcatcagcacaacggcaatgaccagccagagtattaggtttttcgccatgtcactcaagggattaacctcttattacaactgtgttaaaaacagcgtcaggatactctatatccagcatctttcaaactttcgtctgaaatctcccggttagggtttacgcccggtcgctacaatatacacttcccggctacgtgcacgagaagagtccagcttacgaactttgaccttcgtaaacagggagcgaatttcccttagatactcatcgaaaccttcgccctggaacaccttcactacaaaactgccacctggcgctaatacatcacgacacatttctagcgccagttccaccagatacatggcacgggggatatccaccgccggtgttccgctcatgtttggtgccatatcggacatgacaacctggactttgctgtcgccaacgcgctccagcagtgctttcatcaccagttcatcacgaaaatcgccctgaagaaagtccacaccaacgataggatccataggtaaaagatcgcaagcgatgatgcggcctttgccgccaatttgggtgaccacatattgactccaaccacccggagcagcaccaaggtcgacaaccgtcattcccggtttaaagagtttgtcactttgctgtatttcatcaagtttaaaccaggcacgggaacgtaacccctttttctgtgcctgttgaacatatttatcgctaaagtgttcctgaagccagcggctggagctggcagaacgcttcttacctgtcatttaactttcccatggggataactcatcgtaaccaattgcgtaaatttttacgcgcctatttggtgatatatgggagatggcggtagaatgacccgttttcaatcccaacgtaagcaaaaaatacgatgaatctgagtactaaacaaaaacagcacctgaaaggtctggcacatccgctcaagccagttgttctgcttggcagtaatggtttgaccgaaggggtgctggccgagattgaacaagcgttagagcaccatgaactcatcaaggtgaaaatcgccaccgaagatcgcgaaactaaaaccttgatcgtggaagctatcgtgcgcgaaaccggcgcctgtaatgtacaggtcatcggtaaaacgctggtgctttatcgcccaactaaagaacgtaaaatcagcctgccacgctaagattatcctaaagttacacacatttgctgtgtaaaacgaggggttttccgcaggcaggagagcaaaatgccacgctctgttcgttgataaaaggccgcatagcggcctttttcctttctttacaatacatcaacatcttgagtattgggtaattcttacaggtattccaccttaattacttcaaattctacttcgccgcccggcgttttgatgaccacaacatcatcttcttctttgccgatcaggccacgagcaatagggctgtttacagaaatcaggttttgtttaaagtcagcttcgtcatcgccaacgatgcgataagtctgttcttcgtcagaatccagattcagcaccgttacggtagcaccaaaaataacgcgcccattgttgggcattttggtgacatcaatcacctgcgcgttgctcagcttggcttcgatgtctttaatacggccttcgcagaaaccctgctgttcacgagctgcgtggtattcggcgttttctttcaggtcgccatgctcacgcgcttccgcgatagcagcaatgatttcaggacggcgcacagatttcagaaaatccagctcttcgcgtaatttttcagcgccgcgtaaggtcatcggaatagcttgcatttgttatacctcttgaatattcctgatagggcaagtcttcacccaccccggctgttcggcctgcccggcataactccttaccgggaccagaagcaaaaaaataccgacccgggtacaagtcccaggtcagctacaattcacattttgatagtcattttaccctgaagttcccgaagggtcatcgtttactttatagggcgttgcgccgtagtatgacggctcgattccaggttgttagcgcgagattatgcgattttccagatttatcatcggattgaccagctgtatagcgttcagtgttcaggccgcaaatgttgatgagtacattactcaactccccgctggtgccaaccttgccctgatggtgcaaaaagtcggcgcgagcgcccccgctattgattaccacagtcagcagatggcgctgcctgccagtacccagaaagtgattactgcgctggcggcgttgattcaactcggccccgattttcgttttaccacgacgcttgaaaccaaaggcaatgtggaaaacggcgtacttaagggtgacttagtggcgcgatttggtgccgatccgacgttaaaacgtcaggatattcgcaatatggtcgcgactttgaaaaaatctggcgtcaaccaaatcgatggcaatgtgttgatagatacctccattttcgccagccacgataaagcccccggctggccatggaatgacatgacacaatgctttagcgctccgcctgccgccgccatagttgaccgcaactgtttctccgtcagcctctacagtgccccaaagcctggtgatatggcttttatacgcgtggcatcttattaccccgttacgatgttcagccaggtacgcaccctcccccgtggttctgccgaagcgcaatactgcgaactggatgtggtgccaggcgacctgaaccgctttacgctgacgggatgcctgccacaacgttctgagccgctcccgttggcttttgccgtgcaggatggagccagctatgccggtgcaattctgaaagatgagttaaaacaggcgggtatcacctggagcggaacactgctgcgccagactcaggttaacgaacctggaacggtagttgccagtaaacagagcgccccgctgcacgatctgcttaagattatgctgaaaaagagcgacaacatgatcgccgatacggttttccgcatgataggccatgcgcgcttcaatgtgcctggaacatggcgggccgggagcgacgccgtgcgtcagatcctgcgccagcaagccggtgtcgatattggaaacaccattattgccgatggtagtgggcttagccggcataacctgattgcccccgccaccatgatgcaggtgctgcaatacattgcccaacacgacaatgaacttaactttatctccatgctgccgctggcgggctatgacggctctttgcagtaccgtgcaggtctgcatcaggcgggcgtggatggaaaagtcagtgcgaaaaccggtagcttgcagggggtatataacctggcgggattcattaccacagcgagcgggcaacgaatggcgtttgtgcaatatctttctggctatgcagtagaacctgcggatcagcgtaatcgccgtattccgttagtgcgttttgaaagccgtttgtataaagatatttatcagaacaattaatcaaaaagaaaccccggcacatggccggggcttcagattattgacaaagtgcgctttgtttatgccggatgcggcgtaaacgccttatccggcctacaaaatcgtgcaaattcaacatattgcaattctcttgtaggcctgataagcgtagcgcatcaggctgatttggcgtttatcatcagtgattaacgcttgtaaatgaactcaacgccttcttcgtcgtcttcgtcccagtcgtcatcccagtcttcatcatcctcttcagcaatctcttcaagctgctggcgatgataatcatcccacatgaattcgactttctctggctgtttcgcttcttcagcctgcacgaccgggttttcaatgataaaggtcatcacatcccagcagagatctttcacgcccagtccactcgccgcagagatcagataatatttatcttcccagcccagcgcctcagcgatcgctttcgctttctcttcggcttctaccttatccagcagatcgatcttgttgaacactaaccaacgcggtttcgtcgccagatcctggctgtatttttccagctcgctgataataatacgcgcgttttcaaccggatcggtgccgtcaatcggatcgatatcgatgaggtgcaacaggacgcggcaacgttccaggtgcttcaggaagcgaatgcccagacctgcgccttccgcagcgccttcaatcagtcctggaatatcggcaacaacgaagctcttttcgttgtccattcgtaccacacccagacttggcaccagagtggtaaacggataatccgccactttcggtttagccgcgcttaccgcacgaataaaggtgcttttacccgcgtttggcatccccaacataccgacgtcagccagcagcatcagctccagcagcagctcgcgcttatcgcccggcgtgccgttggttttctgccgcggtgtacggttaacggagcttttgaaacgggtattgcccagaccgtgccagccgcccttagcaaccagcagacgctgaccgtgtttggtcatatcgcccatggtttcaccagtaccctggtcgattacacgcgtacctaccggcactttaatcgtcacgtctttaccgcgcttaccggtacagtcgcggcttgcgccattctgaccgcgctctgcacggaaagatttttcaaaacgataatcgataagcgtgttcaggttctcgtcggcttccatccatacgtcaccaccatcaccgccgtcgccgccatccgggccgcctttcggaatatacttttcgcggcggaagctcacgcaaccattaccgccatcacctgcaacgaccagaatgcttgcttcatcaacaaacttcattttattctccgtaaatcattcgcctgcgcggggttggcttaccaccgttgtatgcttacgtaatccgccccaaatacgatgaccaatggcggaatacatcgcgcccgcaaccacgacaaacgcaccgagataacctaaaaggtttaacatcggtctggcgaagaaatcgggccaggccagacttaaaagatcactaaaaaacagcgtaaacagtggggtgagcgtgatgatcgcgctcacctgcgctgcctgccagcgagccatcgcttccgccagggcgccatatcctaccaaggtattcagtccgcaaaaaattaaacatgcgagctgccagtggctaagctgcgctatcactccaggctttgccagagggaagagcgcaattgtacataaagtgtacagtaaaaacaggatctgcggactggccagccgacgcaataaaaccttttgcgccacgccataactcacccaaaccgtcgccgcaccgaccccaaagataactccccaggtgtaatcggtgagctttgtaaatatctcgaccagactggtgttaaaaaacatcaccaggccgctcaggagcatcaatgcccctacaacctgagtgctgcgcattttctctttgaggataaatacgctggcaaccatcatgccaactgggctgagttgcccaatcacctggctagcggtcggactcaggtattgcaaggaactgctgaacaggatgaagttcccaaacagcccggcggtcgccactgccaacaaaatcaaccagcgtggcttacgaaacacgcgtaatggcggcaacctcttcttcaccgcaagaatggcacccaggccaatactcgccatcaagaaacggtaaaacacgattgtcggaggttccatcacctccagcacctgcttcattgcgattggcaacgccccccagcaaattgctgtggtgagcgccaaaagaatgccaatgcctgcctgctgcttcataccgtattccctgcaaagcgcatttgcggattaacgtcgcaccatgcgcatttttaccggttatcgaatgtaaaaagccccgcaacgtgttgcggggctttcatccgttaccgggacgcgaaaaacttattcagcttcgatgctgataaatttacggtttttcgggcctttaacttcgaatttcactttaccgtctgctttagcaaacagagtgtggtcacgaccgcaacctacgttagcgccagcgtggaatttggtaccacgttgacgaacgatgatgctacccgccagaacggattcgccaccgaaacgcttaacgcccaggcgtttagcttcactatcgcgaccgttacgtgtggagccgccagcctttttatgtgccatttgaaatctctcctcaggtcttaggcgctgatgccagtaattttcacatcagtgaaccactgacgatggccctgctgcttacgatagtgtttacgacgacgaaacttaacgattttaactttctcgccacgaccgtgagcaacaacttcagctttgattacgccgccatcaacgaaaggaacgccgattttgacttcttcaccgtttgcgatcatcagcacttcagcgaactcaacagtttcgccagttgcgatgtccagcttttccaggcgaacggtctgaccttcgcttactcggtgttgtttaccaccactttggaaaaccgcgtacatataaaactccgcttccgcgcacaccttttcaatgattcagagtgcgctataaatattcacaatagggcgcgaatattacgcaaaacgcacgcctttgacaagtgctacagtcaatacacgaagaaaaaaaacacaacttgtacggtaacgtttatctgtgccattttttcagtacaatcaccctatattcctaaccataaaccctaagttgcctttgttcacagtaaggtaatcggggcgaaaagcccggcttttgcgatgaatttagaaaaaatcaatgagttaaccgcgcaagatatggcgggtgttaatgcggcaatccttgagcagcttaattccgacgtccaactgatcaatcagttaggctattacatcgtcagcggcggcggtaaacgtattcgtccgatgattgctgtactggctgcacgagctgttggctatgagggaaatgcgcatgtcaccattgctgccctgatcgagtttatccacacggcgactctgctacacgacgacgttgtggatgaaagtgatatgcgcaggggtaaagctaccgccaacgccgcatttggcaatgccgccagcgtgctggtaggcgattttatttatacccgcgctttccagatgatgaccagcctcggtagcctcaaagtgctggaagtcatgagtgaagccgtaaacgtcatcgcagaaggtgaagttctgcaactgatgaacgttaacgatccggacatcactgaagaaaactacatgcgcgttatctatagcaaaaccgcgcgtctgtttgaggctgccgcgcagtgttccgggattctggctggctgtacgccggaggaggagaaaggcctgcaggattatgggcgctatctcggcactgctttccagttgatcgacgatttactcgattacaatgccgatggcgaacagttaggtaaaaatgtcggcgacgatctgaacgaaggtaaaccgacgctgccgctgctgcatgcgatgcatcatggcacaccagaacaggcacagatgatccgtaccgccatcgaacagggtaacggtcgccatcttctggaaccggttctggaagcaatgaacgcttgtggatctcttgaatggacgcgtcagcgtgccgaggaagaagcagacaaagccatcgcagcgttacaggtgctcccggacaccccttggcgagaagcactcatcggcctcgcgcacatcgctgttcaacgcgatcgttaatcccctcccctcatcccgcgcagcgcgcgggatggttccagtaagttccataaaaacacttattcagctctataacacctgaaaaatagggatgtgcatctttatatattctgaatattcacactctttacaggaactttttagagcaataggccatcaggagtatagtgatgctcgacagaagaagtgttctgaatgaaagcgactaacttaaggagtgaggaaaaatggaaagtaatttcattgactggcatcccgctgacatcattgcgggtttgcgcaagaagggaacgagtatggcggcggaatctcgcagaaatggtttgagttccagtacgctggcgaatgcattaagccgcccatggccgaaaggagagatgattattgcgaaagccctgggaactgacccctgggttatctggccaagtcgctaccatgatccgcagacccatgagtttatcgacagaacgcagttgatgcgtagctacactaaaccgaaaaaatgagtggtctggcggtagccccgcgaacggggctgccagctctcagacgattattcgcctttcacacgctcaatatttgcacctaaagcgcgcagtttgtcttcaatgcgttcgtagccacgatcgatgtgataaatacgatcaaccaccgtcgtcccttccgcaatacagccagccagcaccaggcttgcacttgcacgcagatcggttgccataacctgtgcgccagaaagtttttcaacaccgtgacaaataacggtattgctttcgatttcggcgtgcgcgcccatacggctcagctctggcacatgcataaagcggttttcaaagaccgtttcggtgataaacccggtcccttctgccaccaggttcaacagcgtgaactgggcctgcatatcggtcgggaatgccggatgcggcgcggtacgtacgttaacagccttcggacgtttgccatgcatatccaggctaatccagtcttcgccgacttcgatgtccgctccagcgtcacgcagtttcgccagcacggcgtcgagagtatctggctgcgcgttacggcagataattttgccgcgagaaatcgccgccgccaccaggaaagtaccggtttcgatacgatccggcagaacgcgatagacaccgccgcctaaacgttccacaccttcgatgacgatacgatcggtgccctgaccgctaattttcgcacccagcgtaatcaggaagttcgcggtatcgacgatttccggttcacgcgctgcgttttcaataatcgtggtgccttccgccagggttgcagcacacatgatggtcaccgttgcgccaacgctgactttatccatcacgatatgtgcacctttcaaacgaccatcgacggaagctttaacgtaaccttcttccagtttgatggtcgcgcctaattgttcgaggccagaaatgtgtagatcaaccggacgcgcaccgatcgtacaaccgccaggtagactaacttgcccctgaccaaagcgcgctaccagcggccccagcgcccagatagaagcacgcatggttttaaccagatcgtaaggtgcgcagaatacattaacgtcgcgggcatcaatatgcacagaaccattacgttctactttcgcacccagctggcttagcagcttcatacttgtatcgacgtctttcagtttcgggacgttctggatctctaccggttcttccgccagtagtgcggcaaaaaggataggcagagcagcatttttagcgccggaaattgtgacttcgccctggagcttcgttggcccctgaacacgaaatttatccatttagtttgttctcagttaacaattcatatccgctaccggcgaatcgcccatagctcaaaagccgttcagtttgcgatcgcgcgcccactccgcaggggtatacgctttgatgctcacagcatgaatgcggttatccgcaatatattccatcagcggaccatagaccgtctgctgttttttaacccgactcatgccgtcaaacaactcacccacggcaataacctgaaagtggctgccatcgccggaaacgtggacttcctggagggagagagcgttcatcaacacgctctgaatttcattattttccatgggatcttcaatcatcagttaataaaccagcgaaacatcttagagcaaagttgcgctggcataaataagcaaaaagcctcgctgataaatcagacaaggctcgacttgcaggcaggtttgccggacaggcggttaacgccatatccggcctgaaaaaatttaacgaggcagaacatcagcaggcaaattatacaatttcgccagggtatacactttgtcgtttaccccctgaagcgtcacattgttgccctgctttttcgccagatcgataagatggagcagcagtgccagtccccccgtatccacgcgggagacacggctaagatcgatgcaggtaatccccttcaccgcttcctcacgcatttcccaaagcggtagcaaaacgtcctgatccagctctccggataacgccagcgtgtcacccgtctgcatccagctcagactctcgctcattattttttctcttccagagtgattttctgttgagaaatgcttttcagttgcgcagtcaggccgtcgatacctttggtacgcagcagcgttccccactcgttttgtttggtggtgatcatactgacgccttcagcaatcatgtcgtaagcctgccaattgcccgtctgggagtttttacgccactggaagtccagacgcaccggcggacggccattcgggtcaataatggtaacgcgaataggcacaatggttttatcgcccagcggctgttctggcgcaatctgataggtttgaccgtgatacatcgccagcgcctgaccgtaagcctgcttcaggtactcacggaaagcggcaaagtaggcttcacgttgagcaggggtcgcactcttgtaatactggcccagcaccagcgcaccggcgtatttcacctgtacgtatggcagcagttcctgatcaacaatggtacgcagataatccgggttggcccgaatttgcggttgctcattcttcaggcgatcgaacgttttctgcgccgcctcgtccatcagcttatacggattggtctggtctgccgcggttgccgcactcagaggtgcaatcaccagcaaagcgaccatcattaaacgtttaaacatgcgtcggttctcctgaaattatttcgttgtacccacaggttcagtggtttcattattacctggcgcagcagctggcgcatcgccactattcttattgtcatcgcctttactaccgtaaaggaactgaccaatgagatcttccagcaccatcgcagacttagtgtcctgaattgtatcgccatccttcaggatagcagtccccagttccgggtcttcaaaaccgacgtttaatgccagatattgttcccccagcaggccggaagtacgaatgctcaggctactggtatctggaatgtggttataacgttgttcaatttccagcgttacgcgcggcagataggttttcgggtccagcgtaatatccgccacccgacccacaacaacgccaccaatactgaccggagagcgcgctttcaggccgccaatgttatcgaacgtcgcataaagcgtgtaggtcggttcagtacgtatggacgtcacgttcgccgccttcaggcaaacaaacagcgccgccagcagtgctgctaataaaaagatacccacccaaatttcattttttttcgtttgcatgaactcaattcccaaacatcaatgcggtcagcacaaaatccagccccagaacagccagagagctgtggacaacggtgcgagtggttgcccggctaatcccggcagacgtcgggatggcgtcgtagccgttaaacaagctaatccacgtcaccgtgatggcgaacaccacgctcttaatcagacagttgaccagatccatacgccagtcgacggcattttgcattgcgctccagaagaacccgctatcaatgcctttccaactgacgccgaccagagatccgccccagatccccacggcgacgaaaataaccgtcaacagtggtaaactaataaccccagcccagaaacggggagaaataacccgacgcagcggatccaccgccatcatctccatactggagagttgctctgtagcgcgcatcaggccgatttctgcggttagcgcgctaccagcacgcccggcaaacaacaacgcggcaaccaccggccccagttcacgcagtaggcttaacgccaccagcatacccagactggtttccgcactataagtggtcagaaccagataaccttgcagccccaacaccattccgatgaacacgccagaaaccacaataatcagcatgctcaggacgccgacattatagagctggcgcaccagcagcggcgcatgtttgcgaaattccggtttgccgaccagcgcattgaataacattaacccggcccgcccgaacgttctcagggttttaatccctttatgtccgaggctcgccagcgcatttaacagcatgagtggcttaactccctggtaaaagatcagcgtgataatcgccggcaggatagcggaacggaacaggcccgtcagctatcccgtccagaaactgacgtacgcgcggatcaggattcgcctgcaacgcctgggcactgccatgagcgacaatttttttgtccgccaggatccaggcgtgatccgcaatacttaacacttccggcacatcgtgagaaaccaccacacaagtcacgcccagcgcgctgttcagctcagaaatcagcttcaccagtacgcccatggtgatgggatcttgcccaacaaaaggttcatcaaacatgatgagatccggctccagcgcaatcgcacgcgccagcgctgcacgccgcgccatcccaccggaaagttcagaaggcattagtttagccgctccacgcagccccacggcctccagcttcatcatcaccgtactatgcaacaatggcgcgggaagttgggtatgttcgcgcagtggataggcgacgttgtcaaatacgttcatatcagtgaacaacgccccggactgaaataacatgctcatccgtttgcgcactgtatacaggcggctacgagacatcgccggaatattctcaccatcgaaaaggatctcaccatgatctggtgcgatttgcccgccaatcagacggagtagcgtcgttttaccgatgccgcttggccccatgatcgccgtgatcttccctcgcggcacggtcagggaaatattatcgaagatgcagcgattgccacgcgtaaaactgacatcgcgcatatcgactaaattcgccacagactgctccataattcacccttcgtcttgcgttgattttctaagcatggcgctcaatttaaccttgaacccaacatatttacagaatattacccgccgtggttagcgaaagctggcatttgttttactttttagccgcataaagtcaaaattaagcatccgttacggctttctgaaaatcttcagcggaccggcgagtatacctgaagaaaggacgttagatgcttttagctacggcactgttaattgttggtttacttttggtcgtttacagtgccgaccgcctggtttttgccgcgtctattctttgccgaacctttggcatcccgccgctgatcatcggcatgacggtggtcagtattggtacaagcttaccagaagtcatcgtcagccttgccgcgtctctgcacgaacaacgcgatttagccgttggtacagccctcggcagtaacattatcaatatattgctgatcctcggtctggctgcgctggttcgtccttttaccgtccattctgatgttctacgccgtgaattacccttaatgttgttggtcagcgtggtggccggttccgtactctatgacggacaacttagtcgcagcgatggtatctttctcctctttctggctgtgctatggctgctgttcattgttaaacttgcacgtcaggctgaacgtcaggggactgacagcctgaccagagagcagcttgcagagctgccgcgtgacggcggattgcccgtcgcgtttttatggctcggcattgcgcttatcatcatgccagtggccacgcggatggtggttgataacgccacggtgctggcgaattactttgccatcagcgagttgacgatgggtctgacggcaattgctatcggaaccagcctgccggaactggcaaccgcaatagcgggggttcgcaaaggtgaaaacgacattgctgtcggaaatatcattggcgcaaacatttttaatattgtcatcgtgttgggtttacccgcgctgataacgccaggagagattgatccactggcgtacagtcgtgactacagcgtgatgttgctggtgagcattatttttgcgttgctgtgctggcggcgctccccgcaaccgggccgtggtgtaggggtattattaactggcggatttatcgtatggctggcgatgttgtactggttaagcccaatactcgttgaataactggaaacgcattatgagccacgtagagttacaaccgggttttgactttcagcaagcaggtaaagaagtcctggcgattgaacgtgaatgcctggcggagcttgatcaatacatcaatcagaatttcacgcttgcctgtgaaaagatgttctggtgtaaagggaaagttgtcgtcatggggatgggaaaaagcgggcatattgggcgaaaaatggcggcaacgtttgccagcaccggtacacctagttttttcgtccatcctggtgaagccgcgcatggtgatttaggcatggttaccccacaggatgtggtgattgctatctctaactctggtgaatccagcgaaatcacggccttaattccagtgcttaagcgtcttcacgtaccgttaatctgcatcaccggtcgcccggagagcagcatggcgcgcgccgcagatgtgcatctgtgtgttaaagtagcgaaagaagcctgtccgttagggctggcaccgaccagcagcaccaccgccacgctggttatgggcgatgccctcgctgtcgcgctgttaaaagcacgcggctttactgctgaagattttgcgctcagtcacccaggcggcgcactgggtcgtaaacttctgctgcgcgtaaacgatattatgcatacgggcgatgagatcccgcatgttaagaaaacggccagtctgcgtgacgcgttgctggaagttacccgcaaaaatcttggtatgactgtcatttgcgatgacaatatgatgattgaaggcatctttaccgacggtgatttacgccgtgtcttcgatatgggcgtggatgttcgtcagttaagtattgccgatgtgatgacgccggggggaatacgtgtgcgccctggcattctggccgttgaggcactgaacttaatgcagtcccgccatatcacctccgtgatggttgccgatggcgaccatttactcggtgtgttacatatgcatgatttactgcgtgcaggcgtagtgtaaagattcaaggataaacaacaatgagcaaagcaggtgcgagccttgcgacctgttacggccctgtcagcgccgacgttatagcaaaagcagagaacattcgtctgctgatcctcgatgtcgatggcgtactgagtgatggcctgatttatatgggcaataatggcgaagagctgaaagcgttcaatgttcgtgacggttatggcattcgttgtgcgctcacctctgatattgaagtcgctatcattaccgggcgaaaggctaaactggtagaagatcgttgtgccacattggggatcactcacttgtatcaggggcagagtaacaaactgatcgcctttagcgatctgctggaaaaactggcgattgccccggaaaatgtggcttatgtcggcgatgatctcatcgactggccggtaatggaaaaagtgggtttaagcgtcgccgtggccgatgcgcatccactgttgatcccgcgcgccgattacgtgacgcgcattgctggcggtcgtggcgcagtgcgcgaagtttgcgacttattactcctggcgcagggcaaactggatgaagccaaagggcaaagcatatgagtaaagccagacgttgggttatcattgtgctaagtctggcggttctggtgatgatcggcattaatatggccgaaaaagacgataccgcccaggtggtcgtcaacaacaatgatcccacctataaaagcgagcatacggacacgctcgtctataacccagaaggggcactaagctatcgattgattgctcaacacgttgaatattattccgatcaggccgttagctggtttacgcagccggtacttaccacgtttgataaggataaaatcccgacatggtccgtaaaagcagataaagccaagctgaccaatgaccggatgctctatttatatggacacgttgaagtcaacgcacttgtgccagactctcaacttcgcagaatcacgacggataacgcgcagatcaatctggtgacgcaggatgttacctctgaagacctcgtcacgttatacggaacaacatttaactccagcggtctgaaaatgcgcggcaacttacgcagcaagaacgccgagctgattgaaaaggttagaacatcctatgaaattcaaaacaaacaaactcagccttaatcttgtgcttgccagcagtcttctggccgccagcattccggcatttgccgtaaccggagacactgatcagccgatccacattgaaagcgaccagcaatctcttgatatgcaaggcaacgtggttacctttaccggtaatgtcatcgtcacccagggcaccatcaaaattaatgccgacaaagtggtcgttacccgtccgggcggcgaacaaggtaaagaagtgattgacggctacggtaaaccggcaacgttctaccagatgcaggacaacggtaaacccgttgaaggtcacgcttcccagatgcactacgaactggcaaaagattttgtcgttctgacgggtaatgcttatctgcagcaggtcgatagcaacattaagggcgataagatcacttacctggtgaaagagcagaaaatgcaggctttcagcgacaaaggcaagcgcgtaacaaccgttctggtgccgagccagctgcaggacaaaaacaacaaaggccagaccccggcacagaagaagggtaattaattcgttatggcaacattaactgcaaagaaccttgcaaaagcctataaaggccgtcgcgtggtagaagacgtcagcctgaccgtcaactccggggaaattgtcggtctgctggggccaaacggtgccggtaagaccaccactttctacatggttgtaggcattgtgccgcgcgatgcgggcaacatcattattgatgatgacgatatcagtctgctgcctctgcatgcacgcgcgcgccgcggtatcggctatctgccacaggaagcctccattttccgtcgcctcagcgtttacgataacctgatggcggtactgcaaattcgtgacgacttgtctgctgaacaacgtgaagaccgcgcgaacgagctgatggaagagtttcacattgagcacctgcgtgacagcatggggcagagtctctccgggggtgaacgtcgccgtgtagaaattgcccgcgcactggctgcgaatccgaaatttattctgctcgacgaaccgtttgccggggttgacccgatcagcgttatcgacattaaacgcatcattgagcacctgcgcgacagcggcctgggcgtgctgatcactgaccacaacgtgcgtgaaacactggcggtttgtgaacgcgcttatatcgtcagtcaggggcatttgatcgcccacggcacgcctacagaaatcttacaagacgaacacgttaagcgtgtataccttggggaagacttcagactctgatagggtagaagtttgcgacgttttagcaggagagtacgattctgaacatgaagcaaggtttgcaactcaggcttagccaacaactggcgatgacgccacagctccaacaggcaattcgtctgttgcagttgagcacgctggaacttcagcaggagctacagcaggcgctggagagtaatccgctgcttgagcaaatcgacactcatgaagaaatcgacacccgcgaaacgcaagacagtgaaacgctggacaccgccgacgcgctcgaacaaaaagagatgccggaagagctgccgctcgatgccagttgggacaccatttacaccgctggtacaccatccggcaccagcggtgactacattgacgacgagctgccggtctaccagggcgaaacgacgcagaccttgcaggattacctgatgtggcaggttgagctgacaccgttttccgacactgaccgcgctattgctacctctatcgtcgatgccgttgatgaaaccggttatctgactgtcccgctggaagatattctcgaaagtataggcgatgaagagatcgacatcgacgaagttgaagccgtccttaagcggatccaacggtttgatccggtcggtgtggcggcaaaagatctgcgtgactgtctgctgatccaactctcccaattcgataagaccacgccgtggctggaagaggccagactgatcattagcgatcatctcgatctgttagccaatcacgacttccgcactttaatgcgcgtcacgcgtctgaaagaagatgtgctgaaagaagccgtcaatctgatccagagcctcgatccgcgccccgggcagagcatccagactggcgaacctgagtatgtcattccagatgtgctggtgcgtaagcataacggtcactggacggtagaactcaacagtgacagcattccgcgtctgcaaatcaaccagcactacgccagcatgtgcaataacgcgcgcaacgatggtgacagccagtttatccgcagcaatctgcaggatgccaaatggttgatcaagagtctggaaagccgtaacgatacgctactgcgcgtgagtcgctgtatcgttgaacagcagcaagccttctttgagcaaggtgaagaatatatgaaaccgatggtactggccgatatcgcccaggctgtcgaaatgcatgaaagcacgatatctcgcgtgaccacgcaaaaatacctgcatagtccacgaggcatttttgaactgaagtatttcttttccagtcacgtcaataccgagggcggcggcgaagcttcctccacggcgattcgtgcgctggtgaagaaattaatcgcggcggaaaacccagcgaaaccgttgagcgacagcaagttaacctctttgctgagcgaacaaggtatcatggtggcacgccgcactgttgcgaagtaccgagagtctttatccattccgccgagtaaccagcgtaaacaactcgtttgacccaaccgataaggaagacactatgcagctcaacattaccggaaataacgtcgagatcaccgaggcactgcgcgaatttgttacagccaaatttgccaaacttgagcaatattttgaccgaatcaaccaggtctatgttgttctgaaagtggagaaagtcacccacaccagtgatgcaacactgcatgtaaacggtggtgaaattcatgccagcgcggaaggtcaggacatgtacgctgccattgatggcttaattgataagctggcacgccagttgaccaaacataaagataaactgaaacaacactaattgtccgggcaattagcatgtgcatggcggtctgttgtgcggcacaacgggccatttgtacggttaatgctccgagcctgttccactgtttgagtgggcaggttcttaggtgaaattatgacaaataatgatacaactctacagcttagcagtgttcttaacagggaatgtacgcgaagccgcgtccactgtcagagcaaaaaacgcgccctggaaatcatcagcgagctggcggcgaaacaacttagcctgccgcctcaggtggtttttgaagctatcctgacgcgggaaaaaatgggcagtaccggtatcggcaatggtattgccattccgcatggcaaactggaagaagatactctgcgcgccgttggcgttttcgttcagctcgaaacgcctatagctttcgatgccatcgacaaccaaccggtggacttactttttgccctgctggtgccggcagaccaaactaaaacgcacctgcatactctgagcctggtggcgaaacgtctggcggacaaaaccatctgccgccgtttacgcgcagcccagagcgatgaagagctgtatcaaatcattacggataccgaaggtactccggatgaagcgtaattattcggtaatgtctcttttagacgttgtgaggagaaacagtacatggtactgatgatcgtcagcggacgtagtggtagtggtaaatctgtcgccctgcgtgcgctggaagatatgggtttttactgcgtggataaccttcccgtagtgttgttacccgatctggctcgaaccctggccgatcgcgagatttctgccgccgtcagcattgatgttcgtaatatgccggagagtccagaaatattcgaacaggcgatgagtaacctgcctgacgctttcagtccgcaactcctgttcctggatgccgaccgtaataccttaattcgtcgttacagtgacacgcgccgactgcatccgctttccagcaaaaacctgagcctggaaagtgctatcgacaaagaaagcgatttgctggagcctctgcgtagccgagcggatctgattgtcgataccagtgaaatgtccgttcacgagctggctgaaatgctgcgtacccgtctgctgggtaaacgtgaacgcgaactgaccatggtctttgagtctttcggcttcaaacacggtatccctatcgatgcagattacgtctttgacgtgcgcttcttgccgaacccgcactgggatccgaaactgcgtccaatgacaggtcttgataaacctgtcgccgcgttcctcgaccgccacacagaagtacacaattttatctaccagacgcgaagctatcttgagctatggttacctatgctggaaaccaacaaccgtagctacttgacggtcgccattggttgtaccggcgggaagcaccgtagcgtgtatattgcagagcaactggcagactacttccgcagccgcggtaaaaacgtccagagtcgccatcgtacgctggaaaaacgtaaaccatgaccgtcaagcaaactgttgaaatcacaaacaagctgggcatgcatgcccggcctgcaatgaagctgtttgaattaatgcagggttttgacgctgaagtgctcttacgtaatgacgaaggcaccgaggctgaagccaacagcgttattgcgctgctgatgttggattctgccaaaggacggcagattgaagttgaagcgaccggtccacaggaagaggaagcactggccgccgttatcgccctctttaattctggttttgatgaagattaatcttcatcactttgacatacaactcccttcaaactccccccgacaataagaaaatcacgtactgaaatcgttctcaatcaacgtcatttgtacattttgtgcgcttttcactttcagaagaaccttaagaaaaccttaagaggcattgtttaggttttgtttaagttaatcgaccatactggagatcgtcagaaaatatttccaggagatggcatgattcgcttatctgaacaaagtcccctgggcaccggaagacatcggaaatgttatgcgcatccggaagatgcccaacgctgtatcaagattgtctaccatcgtggcgatggtggcgataaagagatccgccgtgagttaaagtactacgcgcatcttggtcgccggttaaaagactggagtggaataccgcgctatcacggtaccgttgagacggattgcggaaccggttatgtctacgatgtgattgcagattttgacggcaagccttccattacgctgaccgaatttgctgaacaatgccgttacgaagaagacattgcacaactgcgccagctactgaaacagctgaagcgttatttgcaggataaccgtatcgtgacgatgagcctgaagccgcagaatatcctctgtcaccgcatcagtgagagtgaggttatcccggtcgtctgcgacaacattggtgaaagcacattgattccactggcgacctggagcaagtggtgttgtctgcgtaagcaagagcggttatggaaacgatttatcgcccaaccggcgctggctattgccctgcagaaagatctgcaacctcgtgagagcaaaacgctggccctcactagccgcgaagcttaatccagctggtgttgttgcataaacggctcaccgcctaactgatacatctgccgtaaaatccacgcctgacggctacgcacgtagccgcttgggctggagactttgaaacgaagtggattaggtaatacagctgccagtaatgcagcttcgctccgggtaagtttgctcgcgggtttgtggaaataacgttgtgccgcagcttcgacgccaaacacaccgtcgccaaattcggcgatattcaggtaaaccgtcaggatacgctttttgctccagaccgtttctatccccagcgttaatccggcttccagcccttttcgaacccagctacgcccatcccataaaaagagatttttggctgtctgttgagaaatcgtactagcaccgcgaatacggttttcattgcgctcgttgtgcgccagggctttctcaatggaagcgacatcaaagccccagtgctcaggaaatttctgatcttctgcggcaatcaccgccagtcccatccacgggctgatttgatccatactgacccagtcagaatgtgccacgtaacgaaaattgccatgcagccaggcgctgacctgtcgctcgaccattaccgcactgaagggaacaggcgcaacgctaaacaacgcgatgcccccgccccagaaaacggcgaggacaaccattaaccgcaaaagaaaacggcgaacgaaactaaacaccgttaagcggcttttactcattcagccagaaccagcacgcgggaaaccagcttatcaatgccgctcgccgcttctgcaatgttctgcgccagcatatatgctggggtggtgacaatcttattgtcttcatcaaccacgatatcatcgacaggacacggcacatgctccgcgcccatctcttccagcacttctgcggtatcgatatcagtaccgatggtcaaacgcagcgggaaatcgaaaattttcggcagcatcgccggggcaatacacataaaaccaagcggttttccggcctgatgcatcgcttgtgccagcgcctttaattcacggtcaacggtgcattcgctaccaagactggcaaaattgcttaaattcttcgccgcgccaaacccccccggcacaatcaacgcatccagttcagcggcatcggcctgggccagaggacggatttcaccgcgcgttattcgtgccgcttcaatcagcacattgcgcgtttccgtcatcgcttcgccagttaaatggttgataacatcaacctgctgcttatccggtgcaaagcagaccgcctgcgcaccgctgcgactaatagctaacaacgtcaacaccgcttcatgaatttcagaaccgtcatagacgccgcatccgctcagaattacgccaattttcttcattgtgatcatcctttcgcaattgactgaaacacattaatttttttaataaaaatggtacgcatcacacatttaactgattcatgtaacaaatcatttaagttttgctatcttaactgcgtgcggcctgaaaaacagtgctgtgcccttgtaactcatcataataatttacggcgcagccaagatttccctggtgttggcgcagtattcgcgcaccccggtctagccggggtcattttttagtggcttttgccacccacgctttcagcacttctacgtcgtgacgccactcttctttcatctcttcaatccattcaccgacgttatcttcccaggccggaaggtcaggagactgaatttgctgacccagctgttgcagatggcgtaaccccacactccccgccgcacctttaattttatgtccttcctcaacaatgccttttttatcctgcgccgtcagattgctctccagcacgctgacatagcccggcatcatcttctcaaacaccgctaacccgtcggtgatcagcttcggtcctacaagttcgagatactgttccagcatgggaatatcgagcaatgcttcacttttactgttctcttctgtcgtcaccgtactctcctcatcatcctgggtatcccagaatttcttgatcatcgcggttagcgccggaacagaaagcggcttactcagcacatcatccattccagcattgaggtactcttgtttgtctttcagcacgttagcggttaaggccaccagcggcggtaaatcctcgcgcggataacgtttcgtcagttcacgagagatatccagcccggtcatatctggcaactgaatatccagcaacaccaggtcgtattcgcccggtttaaacatctccagcgccgccttgccggtcatggcgacatcaacgctgttacctaatttttccagcacagaacgcgcaacaatcacgttcagttcaatgtcttccaccagcagcacattcagcgccggtaaaggcatatcgtcttcatcaaacgcatcatcgacctcttctgctacgctcggtgcgtggatcgtcaacgtaaaggtactacctttgccctgttcgctggtaaccgtaatatcgccgcccatatttttcgccagacgacgagaaacggccagaccaataccggtgccggtggcaggtttaccgccatgactgtctttcacctggtaatacatggcgaaaattttatccagctcatcctgcggaatgccgataccagagtcttccacttcaaaatgcagcatatcgccttcatcgtagcgcacgcgcacggtaacctggccttgctgggtgaatttgacggcgttactgatgaggttccacaggatctgccgtaaacgcgtcccgtcggtaatgacctgatgcggtaatggcagcgtcggctccaggttaaagcgcaatcctttttgttgcgcctgcaatgcggagagattttccagatcggcaaggaagctggtgaaatcaaccggttgattatcaagctggaccttgcgccgttccatcttatccatgtcgataatatcgttaaagatattccccagcgtgacggcgctaacatggatggtcttgagatatttttcctgctcggcggtgagttcggtatccagcagaatgcggctcagaccgacgataccgttcagcggtgtacgcaattcgtgactgatggtggagataaacgtcgttttgtcgcggctggcccgttcaagcgcatcctgataccgcttacgctcggtaatgtcgcgaccaaagcccatcaaaccgtgacgtttacccacgcggtcgtagtacggcactttacggatttcaaagcaggctttgcgcccgtccgggtaatccagccactgttcataggtcagactcacattatgacggaacactttttcatcggtttcaatgacttttgcggcggcttccggactgtaaacatcagcaggtttcaggtgaaccagttgtttttcgctttttccggtcagcagctccatcgcgcggttacagccggaaaactctttatcttcgttacgataaaaaaccaggtcgggactagcatcaaggaaggaacgtaagaaactggattgctgctcgagctgaatttgtgtctcttcgcgctctttgatttcaattttcagttggccgaaggtttcctgcagttctgcttccgctttttcacgaacggcaatttcctgatttagctgggcaatattatcttttaactgaacgttgaggctcaaatcgcgctcgcgcatctcctccagtttttgcaccagccgactcagacgttgtcgactctcctccagttgctcgacgaccacgcttagaaagtagaccgcccacggcgtaatcagcaaaccaaagaagatagaacgaataacatcaatgctttcgacctgaccatgcagcaccatggttaccgccatttgtaccacaatggcaagaacgacgagggccagcgccagcaacatactgaagcgcaccagacctaacttcatcatcaggtcaacataatactgcgccagcagacgaatttgcttcattagggaattccttcacgacaacctgccccaataatacccaattctgacagttacgttataaattgtgtgagaaatgcggaattcccctcaacgacttactccgttggaggtagccacggacgtcccagcgcgcttccctgtacgccatgttcattcagatagcgatccagctcgaccattcccgtccatcgattttcgcaccacagcggagcaagcagcgtcgggcgacgggcgctggcggaaatgcggtggtagatcacttccggtggcgtatggcgaatcatttctccggcagtgagcgtgtaatcctccagttcaataccgttcaaacgccccgcttcccaggctttcgccataatgctgcctttcacaatatgcagcggatgcagctttatgccgtccacgccggtttcaaccactcgctccagcgtttgcaaacattcagcctgcccttcgccaggcaggccgacaattaagtgggaacacaccttcagcccgcgctgacgtgccagctgggttgtacgctgataacaggcaaaatcatggccgcggttgatgcgatgcagtgttttgtcgtgggcggtttgtagccccagctccagccacacttcgtaaccctggtccttatattcgcaaagcagatccagcaccgcatccggcacgcagtccgggcgggtacccacacacaaaccgacaatattggcctggctcaccgcctgctgatacatagaacgcagcacctgaacttccgcaaaggtgctggtatacgcctgaaagtaggccagatagcgtttagcgcggttaactaaattcgcctggtgcgccagttgctcggcaatggaacgatgctgctgcgcttcatcggcaaagctggcaacattacagaatgtgcagccaccacgcccgatggtaccgtcacggttagggcagctaaaaccgccgtgcagcgtcagcttatgcaccttttgcccataacgacgggtgagatcaccaccaaacatattgactaatttctgtaactgcataatctgatagaccgcgccttgaaaagaggccaaagcctgccatttttagctcaattcggcgatgacctggatcaatcgtcccggcctgcttttatcaactgcataatcaatcaaaattaccgaaatttcatgcataatcacataaatcacttttgcttatcttgtgtcagatttttttatctcctgatggattttaggcaaaaacagtagcatgaaacgtcattaccaattaaggcagtataaaatgctggttttgtcgtcagttcaaggcaggataagggttaacacacctttatgacagtcaggaattgactgtttctctaacgacttcccttttagccttaaagataaaatccattttaatttcagtcatttaataaagaattttgcgctaaagcacatttctgtaccaataagcttgccatttgacctgtatcagctttcccgataagttggaaatccgctggaagctttctggatgagcagcctgctcatcatatttatgcagtaattgagatcccctcttcaccgtattaaccgatgcgaaaaggacaacaagggggcgaatgcgaggcgcgcgtatgacacgcaaaccccgtcgccacgctctttctgtgcccgtgcgcagcggtagcgaagtggggttcccgcagagcctgggggaggttcacgatatgttgtacgataaatcccttgagagggataactgtggtttcggcctgatcgcccacatagaaggcgaacctagccacaaggtagtgcgtactgcaatacacgcactggcccgcatgcagcaccgtggcgcgattctcgccgatggtaaaaccggcgacggttgcggcttgctgttacaaaaaccggatcgcttttttcgcatcgttgcgcaggagcgcggctggcgtttagcaaaaaactacgctgtcgggatgctcttcctgaataaagatcctgaactcgccgctgccgcacgccgcatcgttgaagaagaactgcaacgcgaaaccttgagcattgtgggctggcgtgatgtccccactaacgaaggcgtgctgggtgaaatcgccctctcctctctgccacgcattgagcaaatttttgtgaacgccccggcaggctggcgtccacgcgatatggagcgccgtctgtttatcgcccgccgccgcattgaaaagcgtctcgaagccgacaaagacttctacgtctgtagcctgagcaatctggtgaacatctataaaggtctgtgtatgccgacggatctgccgcgcttttatctggatcttgcggacctgcgtctggaaagcgccatttgcctgttccaccagcgcttctccactaacaccgtaccgcgctggccgctggcgcaaccgttccgctatctggcgcataacggtgaaatcaacaccatcaccggtaaccgccaatgggcgcgtgcgcgtacttataaattccagacaccgcttatccctgacctgcacgacgccgcaccgttcgtcaacgaaaccggctctgactccagtagcatggataacatgctggaactgctgctggcaggcgggatggatatcatccgcgccatgcgtctattagtaccacccgcctggcagaacaacccggatatggacccggaactgcgtgccttctttgactttaactccatgcatatggagccgtgggatggcccggcgggcatcgtgatgtccgacggtcgttttgccgcctgtaacctcgaccgtaacggtctgcgtccggcgcgctacgtcatcaccaaagataagctcatcacctgcgcctctgaagtcggtatctgggattaccagcctgacgaagtggtcgaaaaaggccgcgtcgggccaggcgaactgatggttatcgacacccgcagtgggcgtattctgcacagcgcagaaaccgatgacgatctgaaaagccgccatccatataaagagtggatggagaaaaacgtccgccgactggtaccgtttgaagatctgcccgatgaagaagtgggtagccgcgaactggacgacgacacgcttgccagctaccagaaacagtttaactacagcgcggaagagctggactccgtaattcgcgtactgggcgaaaacggtcaggaagcggtcggtagcatgggcgatgataccccattcgccgtgctctccagtcagccgcgcattatttacgactacttccgccagcagtttgcccaggtgactaacccgccaatcgacccgctgcgtgaagcgcatgttatgagcctcgccaccagtatcggtcgtgaaatgaacgtcttttgcgaagcagagggccaggcgcaccgtttaagctttaaaagcccgattctgctctactccgatttcaaacagctcacgacgatgaaagaggagcactaccgcgcagatacgctggatatcacctttgacgtcactaaaaccacgctcgaagcgacagtcaaagagctgtgcgacaaagccgaaaaaatggtacgtagcggcaccgtgctgctggtgctctccgaccggaatatcgctaaagatcgcctgccggttccagccccgatggcggttggcgcgatccagacccgtctggtcgatcaaagcctgcgttgcgatgccaacatcatcgtcgaaaccgccagcgcccgcgatccgcaccacttcgccgtgttgctgggcttcggcgcgacggctatttatccataccttgcctatgaaacgctgggccgcctggtagacacccatgcgattgccaaagattatcgtaccgtgatgctcaactaccgtaacggcatcaacaaaggcttgtacaaaatcatgtccaaaatgggcatctccaccatcgcctcttaccgctgcagcaaactgtttgaagcggtcggtctacacgatgatgtagtgggcctgtgcttccagggggcggtcagccgcattggtggagcaagctttgaagacttccagcaggatctgctgaatctgagcaaacgtgcctggctggcgcgtaagcccatcagccagggcggtctgctgaaatacgtccacggcggcgaataccacgcctacaacccggacgtggtgcgcacgctgcaacaagcggtacaaagcggcgagtacagcgactatcaggaatacgcgaagctggttaatgagcgtccggcaaccacgctgcgcgatctgctggcaattacgccgggtgaaaacgcggtcaacattgctgatgttgaaccggcaagcgaactgtttaaacgctttgataccgccgcgatgtctatcggcgcgttaagcccggaagcccacgaggcgctggcggaagcgatgaacagcatcggcggtaatagcaactccggtgaaggcggcgaagacccggcgcgctacggcaccaacaaagtgagccgcatcaagcaggtggcttccggtcgctttggggttactccggcgtatctggtcaatgccgacgtcattcagattaaagtcgcccagggcgcgaagccaggcgaaggcggtcagttgccgggtgataaagtcacgccttacatcgccaaactgcgctatagcgtgcccggagtgacgctgatctccccgccgccgcaccacgatatctactctatcgaggacttagcgcagctcattttcgacctcaagcaggttaacccgaaagcgatgatctccgtgaagctggtttccgaaccgggagtaggcaccatcgcgactggcgtggcaaaagcttatgcggacttgatcaccatcgcaggctatgacggcggcaccggcgcaagtccgcttagtagcgtgaaatacgcaggctgtccgtgggagctggggcttgttgaaacccagcaggcgctggttgctaacggcttgcgtcacaagatccgtttgcaggtcgatggcggcctgaaaacgggtgtcgatatcatcaaggcggcgattctcggcgcagaaagcttcggcttcggcactggcccgatggtggcgctcggctgtaaatatctacgtatttgccatctgaacaactgcgcaacgggtgtagcaactcaggatgacaaactgcgtaagaaccactatcacggcctgccattcaaggtgacgaattactttgagtttatcgcccgtgaaacccgcgagctgatggcacagcttggcgtaacacgtctggtggatctgattggtcgcaccgacctgctgaaagagctggacggtttcaccgccaaacagcagaagctggcgctgagcaagctgctggagactgccgaaccgcatccaggtaaggcactctactgcaccgaaaacaacccgccgtttgataacggcctgctgaacgcgcagttgctgcaacaggcgaaaccgtttgtcgatgagcgccagagcaaaaccttctggttcgatattcgcaacaccgaccgttctgtcggcgcgagccttagtggctatatcgcccagacgcacggcgatcaggggctggcagccgatcctatcaaagcgtacttcaacggcaccgcaggccagagcttcggcgtgtggaacgcgggcggcgtggaactgtacctgaccggtgatgccaacgactatgtcggtaaaggcatggcgggcggcttaatcgccattcgtcctccggttggttccgccttccgcagccatgaagcaagcattatcggcaacacctgcctgtatggcgcgaccggtggtcgtctgtatgccgcaggccgcgcgggtgaacgtttcggcgtgcgtaactccggtgctatcaccgtggtagaaggcattggcgacaacggttgtgaatatatgacgggtggtatcgtctgcattctgggtaaaaccggcgttaacttcggtgcgggcatgaccggcggtttcgcttacgttctcgatgaaagcggcgatttccgcaaacgcgttaacccggaactggtcgaggtcttaagcgttgacgctctggcgatccatgaagagcatctgcgtggtcttatcaccgagcatgtgcagcataccggctctcagcgcggtgaagagattctggcgaactggagtaccttcgccactaaatttgcgctggttaaaccgaagtccagtgatgtaaaagcactgctgggtcaccgtagtcgtagcgcagctgagttgcgcgtgcaggcgcagtaaggggtagcaacaatgagtcagaatgtttatcaatttatcgacctgcagcgcgttgatccgccaaagaaaccgctgaagatccgcaaaattgagtttgttgaaatttacgagccgttttccgaaggccaggccaaagcgcaggctgaccgctgcctgagctgcggcaacccatactgcgagtggaaatgcccggtacacaactacatcccgaactggctgaagctcgccaacgaggggcgtatttttgaagcggcggaactgagccaccagaccaacaccctgccggaagtttgcggacgagtctgcccgcaagaccgtctgtgcgaaggttcctgcactctgaacgatgagtttggcgcggtgaccatcggcaacattgagcgctatatcaacgataaagcgttcgagatgggctggcgtccggatatgtctggtgtgaaacagaccggtaaaaaagtggcgattatcggcgcaggcccggcaggtctggcgtgtgcggatgtcctgacgcgtaacggcgtaaaagccgttgtcttcgaccgtcatccagaaattggcgggctgctgaccttcggtattccggccttcaagctggaaaaagaggtaatgacgcgtcgccgtgaaatcttcaccggcatgggtattgaattcaaactcaataccgaagtgggccgcgacgtacagctggacgatctgctgagtgattacgatgccgtgttccttggcgtcgggacttatcagagtatgcgcggcgggctggaaaacgaagacgccgatggcgtgtacgcagcgctgccgttcctcatcgccaacaccaaacagttaatgggctttggtgaaacccgcgacgaaccgttcgtcagcatggaaggcaaacgcgtggtggtccttggcggtggcgacactgcgatggactgcgtgcgtacgtccgtgcgccagggagcgaagcacgttacctgtgcctatcgtcgtgatgaagagaacatgccgggttcccgccgcgaagtgaaaaacgcgcgggaagaaggcgtagagttcaaattcaacgtccagccgctgggtattgaagtgaacggtaacggcaaagtcagcggcgtaaaaatggtgcgtaccgaaatgggcgaaccggacgccaaaggccgtcgccgcgcggagatcgttgcaggttccgaacatatcgttccggcagatgcggtgatcatggcgtttggtttccgtccacacaacatggaatggctggcaaaacacagcgtcgagctggatagtcaaggccgcatcatcgccccggaaggcagcgacaacgccttccagaccagcaacccgaaaatctttgctggcggcgatatcgtccgtggttccgatctggtggtgaccgctattgccgaaggtcgtaaggcggcagacggtattatgaactggctggaagtttaagcgaggtaacaatgaattcgccagactgtgtctggcgaatcaaattactgacgaagtgcgcgttgttttctggcaaatgcggcatgagcgtttgacctttcctataatagggataattttcaataaattgtgctttgttcaccaagtctgatgagtgaagcacatcaagcaatttctcatttacaatccgtctcaattacttgttaacacctctgacaataccgattctgcaagctattcagtcttttcattccatgtaaattgtctcgatattaatatacaaaatatgaatataaaaaaccaatatattatccttaattatctatatattttcctatttttcagcgcaaacattcatgtaatgaataattatcaccacaaaccacctcaccagcaccttattattcacatgatcgtaactataaaattcattaaataaatacatcccagcaagttggctatttctgaacgagttatttatttacattcacaaacagatatatatactgcttcagctttttattttaaaaaataaatttgttattaaggatatgttcatatgtttttcaaaaagaacctcacaacagctgctatttgtgcagcactttctgttgcagcattcagtgccatggcaacagatagtactgatacagaattaactatcatcggcgagtatacccctggtgcatgtaccccagttgttacgggcggcggcattgttgactatgggaaacatcataacagtgcgctgaatccgaccggtaaaagtaataaactggttcaactgggccgcaaaaacagcacattaaatataacctgcacagcaccaacgctaattgctgtaacctccaaggataaccgtcagagcaccattgtagcgttaaacgacacatcctatattgaaaaagcttatgatactctcgtagatatgaagggaacgaaaaacgcctttggtttaggttctgcgcctaatggacaaaaaattggcgctgcatccattggtattgacaggtctaatggtgggattcacgcggcggacgatacaggtgaaattcctgtcgacctgattcaaactgaccactggagtgcagcgacccccacatggaaagccagttctaatggcgcattctgcagcctgacaagttgcagtgcaatcgagcgcggttattctgttgcaaaaacaggggaactgacacctgttgctattacagcggtcaccttcccgttactgattgatgctgcggtaaatgacaatactattcttggttctgatgaaacgatcaaactggatggtaacgtcactatcagcgttcagtatttataagaacttgtaatacagtttttatttttacgcattaaccagttagctataactcggacagattatgccctatgacatggtctgtcttaatcaatctcatcgcaaacagtgcataacatatattaacaatatgtttctgcgttatttatcattattacaggagttttaatttaaatgctcagacacattacattcactgtatttataacaacatcaatgaatactaacaatgccggacaggagtactatcaggcattcgttttatacgatcggttaatgtttcaggaaagctcttcgcatatcttggggaaagtaaatgtaatacgctgttcttaattgttcagtgctcaccccccagagtatagctcattccattattcaacttagctccatataaagggacagataatggaaagcctcagtgaaggaaccacagcaggctaccagcaaatccacgacggtattattcatctggtcgatagcgcccggacggaaacggtacgtagcgttaacgcgttaatgaccgcgacgtaccaggaaattggccgacgaattgtcgaatttgaacaaggtggcgaggccagggctgcgtatggtgcgcagctaatcaagcgactaagtaaggatttatgtctaaggtataagcgtgggttctctgcaaaaaacttacgccaaatgaggcttttttacctcttttttcaacatgttgaaattcaccagacaatgtctggcgaattaacaccattgggaattccgcagacaccgtctgcagaattcccaagcgcaaagatttggcagacgctgtctgccaaatctttccccttgcccaggtccacctacgtccgtttactttccgttaaaaacgctgacgcccgcagcttttatgaaaaagagacgctccgctgtggctggtctgttcgccagctagagcggcaaattgcgacccagttttatgagcggacactactgagtcatgacaaaagtgccatgctgcaacaacacgctcctgccgagacgcatattcttccgcaacaggcgatacgcgatccctttgtgctcgaatttctggaattgaaagatgaatatagtgaatccgattttgaggaggcgctgatcaaccacctgatggatttcatgctggaacttggggatgattttgcctttgttggtcggcagcgaaggttacgcattgatgacaactggtttcgtgtcgatctgctgtttttccaccgccgtttacgctgcctgctaatcgtcgatctaaaagtgggcaaattcagctatagcgatgccggacagatgaatatgtatctcaactacgccaaagagcactggacgctaccggatgaaaatccgcccatcggtctggttctctgtgcagagaaaggagccggagaagcgcattatgctctggcaggtttgcctaacaccgttctggcaagcgaatataagatgcaactacctgatgagaaacgactcgcagatgaactcgttcgaacacaggcggtgctagaggaaggctatagacgccgttaatttcagcggtttcgaattctgcagacagtgtctgcagaatctttaaaacgaactaagttttaagccattaaatcagccttaaccttcaccacaacctttttaatctctccaggctcgccgacaacgcatcctggtttatgcggttcacctggcataaacacggcgaacattcccggttttaagatgatggcttgctcgttatcaatggtgctgcaaagctgataatcatcctcatggtggaactcttcacactgacgcgcagtgcctgccatgccaaacagaatccgttcctcaccgtttaataacagctggatatcaatgtattgctcgtgcaattccgcttttttctcgacggggctttgagtgttaaacgtcatgacattcataaagatattgtcgccctgtaattcgtaacgacccggcgctttttcttgcggtctggcagctaatgccagcgttaacgcgtcctgtaacgcaggatgtaacccagcagacggtaaactctgtacttcacccatcatcataatttttctccctgggccaacagcgtagccccaagtaaacctgcatcatggcggtaatgcgccgccagtaaatcaacatgaaatgccgctggctcctgcgccagatacgtttccaccagcgccagatacccttctgccagaccaacgctgccaccgaccaccacgcactggcaatcagttgtggctttaatatcagcgatcagccttgcaagcgtacgtgcggagcggtgaatcagctgctgcgcctgctcgtcaccctgcccggcgcgcgtgaaaatagttttcgcatccgcgccagccaactccccctgcgctgccgctgcaatgccgcgaccagaagcaatcgcttccacgcaacctgtgcgtccacagccgcagactgggccgtgtggatcggcaagcgtatgcccgatatgccccgccagaccgccagggccggtaagcagtttgcagccgctcactacaccgccgccaacgccggtggaaacggtgataaagaccatatcggttatatcgccatccagcgcctgaaactccgcccatgctgcggcctgcgcgtcgttaatggcaatggtcggcaaattggtaagttgttccagcgttttgactaacggaaagtgtagcaatccaccaagattatgcggattaagtgccagcaagctgccgtcacggattatcccggtgctagcgatggcaacccgctgcgcatgagcttgcaacggagagactaatgcggataaggcatcacgcaaggcttctggtgtctggctggctggcgtaggaagttcacgacgatcgcggatctgcccgtcagcgccaatcagcgcggcggcaagtttagtaccgccgatatcaatcgccagtgtggtcatagcaccgcctttttcatcgctgtgttgtaccactgacaaatgtgctcaagacgcgtgattgcagaaccgaccgtcaccgcccacgcgccgtggcgcatcgcatccgccgcctgagcaggcgtgttgtaacgcccttcggcaatcacccgacatccggcgtcgctcaacgttttcaccagcgccagatccggctcttctggcgtttcaggcgtggtatagccagaaagcgtagtgccaataatttcggctcccagcttttggcatgccaggccgtcttccggcgtactgcagtcggtcatcgccagtaaaccgtgatggtgaatacgtgccagcagcgtttcaacaggcaccggacgcgggcggtcggtgccgtcaatggcgataatgtccgcgcccgcctgcgccagcgcatcaacatcttcaatataggccgtgatgcgtaccggagaatcctccagatcgcgtttcacaattccaataatcggcacgctcaccaccgcacgcgtggcttgcagatttgccacaccttcaatgcgaatggcaaccgcgcccgcctgttctgccgctaatgccatggcggcgacgatttcgggtttatcgagcgggctgtccggaaccggctggcaggagacaatcaggccaccgttagcagcgattttttgatccagttgtgcaagtaagctcatacatcttcccttagcgaaaggcccggtacatagaccgggcaacaggattaacttttggttttgactaaatcgtttttggcgctgccaaacggcacggcaccgctgaatggtttaccgtcgatagcgtcatgagtacgcaacgcttccgggcgcaaccaacgctgaacgcgagaaggcatatccagcccaatcagcaggatcaccacgaacgtcagactgaagctgaggcttgccagcgcagtacccagatccagacgttgagcgatcaacgcgccgatgattggggccagtgcaccgcccaatgcgccaacgttgtaggtaaagcccaggcccgctgcacgctggtcggtatcgaaataaccgccaatcagttttggtaagatcccggcgatcccttgtccaagcatttgctggaagaacagtaacagaccgagcacccagacgtttgcgccgccaatcgcaaataccggaataatcagcagctggctggccagcaggctacaaacgtacgctttgcgggttcccagccagtcaccgaggaagccacctacgcagcatcccaccgccgcgccaaagccactaaagaacagcacattggctacagtatgcgggttataagccagatcggttttcagatacgttggcagcagcgcctgaatcggccaactgtagaggaaagcaaacaacacgaccaccatcagcattacgcccgttggccagcgtttgcctgcactctgcaccataaagctgataaagattgcggcgcataacagcccaagaacagcgacgatcgcggcattttgcaggttaccggcgaagcagaaccacagcgcagtagccgccgccagtgtcattacgatattggcaatgcgatgttcaccacggtagagaatatccaccattgtgcgtactggtgctttacctgcgtgtttctctttccagtcttccgcttccgggatgtttttacgcagccagagagcaaagatgattggcaaaatgccgataaagaacagcgcacgccagccccagaccggaaccaccaggctatagacctgagcggcaacgacggcccccacagagaagccactaatcaaaaaaccactggctttgttacgcagatgttttggccagctttcaatgacataggtggcgctggaaccgtattcacccgccatccccatgccgatgaccagacgagcgataaacatggtgatgtagcctggcgcaaagccgcaggccagcgtcccggcgctgaagagaacgatgctggtgaccattgccagacgacgcccgtagcggtcacccatagcgccgagcatcaggccgccgaaccagcgagagataaaggctgcagagatcagacttgccgcctgcaccgtcgtcagcccgaattcaccttgtacttcggtgagtaccagggcgattaaaacgaaatcaaaaccgtcaagcagatatcccaaccaggcagcggaaaatgcgcgccattgtgcacggttgagatggcgataccacgggatattctgggttgtagtactcattgtgagtctcccgcggtgggcgatgcccacacgctttggtatgaaaattgtagggtacagatgcgtttatttcccctcacccggtaggggcgagcgaggggaaacaactcacccgcgctcttgcatcaactgctgggccagcgccttcagttctggcagatatttttcatctaccggtccaaacggtttgcggcacagcggcacagaaacgacatccatataatggaggacagttttcaggccgcggaatacgcccgttttgatcagtaaatcaatgactttattgcattcagtttgcagtttctgcgcggtctggatatcgccttctttcagcgccttaacgatcccctgatagcgccagcccatgatgttgtaggtactgccgataccaccatcagcgcccgccagcagaccagaggcgaagatttcgtcgtaaccgttatagagcacaagatcaggatgttcacgacggatctgctccatctgatagagatcgccagaggtctgtttcagcgcacctacgccaggcaatgtaacaagtgtgttgatctgatccagggtcagttttaccccactcagggctggaatgttgtacaccaccatcggcaaaccatccgcgctatcaataattgcccgatagtgatcgcagtgttcttcaaagctgaaaggatagtagaacggcgtgacggcggagacggcatcgaagccataacgtttagcgcttgccgcaagttgttggctttcggcggtgctgacgcaaccgacgtgggcgatgagtttaatcttacctttcgcctcttcggcgacgatttccagtacctgttcacgctcggaaaggctttgtacaaaggcctcgccggtgctaccacccacgtataaaccgtcgatgccctgctgaatattgaactgaaccaggcgacgcagactcgctttatccagtgcttgttgttggtcaaaaggagtcaggagtgcagccattacgccacgtaaattcgttgccataaatacctctgaagtgatgcttgtctgataaacgatatacctttatacctgttataccagatcaattaagcaacaccccatacagaaagcttataatgcgatctgcttcactaaagtggcattatttctttttgttggtggtctgaccgaaagcgtgccaggtagcagagacgctgttgagatggctttgcaacgcacgatcggcttcgtcaggatcatgacggcggatcgcatcaacgatcgcaatatgctgttgataactaacgttgttatgttcgtgcagtgcctgatcggtaaccgttgggcgtgcggcaataagccagtcgagcagggcaacgtggatcgccatgaagattgggttaccggggatctccgccagcacgcggtggaaatcaacgtcactacgaatgaatgccgcgttgttatccaggctctgactgttgatttccagtgcttttgccagcaaatcgatttgctcatcggtggcatgttcagccgcatagcgcaccagactggattcaaagaacagacgtaattgttcgaaatgggcaatcccaccgggatgagaaaggaaatctttcgccatgccggaaagctcaccgatgatagtgtccgcagaaggacggctgacgcgagcgcgttcgccgttgtttatttgcaccagacctttgcgttttaacgctgccagcgcttcacgcacgctaggacgcccgacgttaaagaacgccatcagttcgcgttcagacggtaattgttcaccttcgccaaattcacgacggcggatcatctgttccagctcttcttccaccatttcggagagttttttacgcgccagcgggcggctacgcaagttgcgaccaattgcaggactagaatcttcggtttggctatcaaatgcgttcataaggcccattctgtaaggtcagtgtgattaacatcatcagtgacatcctatcacaggattgaaagtaggggaaaatggcagggttttctctttgtgcctcatcattaccataattaacggaataattaactattgcgaaaaattaatgtaacgcagataaaaacatcccgtttgaattatttataagactattcacgagcattatgaatattatgaatgtgttcttacaaaataatcataagcgcatattttttaatgaaaaatcacctcacctacaattaaaaacacgacatccgcaccataaatagccttgcaaaaaatataacatcgttgttttcaatctgccgtttatgggattgaccgttttcttttgacacggagttcaacaatgttcggcataattatatctgtcatcgtattaattacgatgggctatttgatcctgaaaaactacaaacctcaggtggtgctggctgccgcaggtatcttcctgatgatgtgcggtgtctggttagggttcggtggtgtactcgatcccaccaaaagcagcggctacttgatcgtcgatatttataatgaaatcctgcgcatgctgtccaaccgcattgccggattggggctgagcattatggcggtgggcggttatgcccgctacatggagcgcataggggccagtcgcgcgatggtgagcttgttaagccgcccgttaaaactcattcgcagcccgtatattattctgagcgcaacttacgtcatcggccaaatcatggcgcagtttattaccagcgcctccggtctgggtatgttgctgatggtcaccttatttccgacgctggtgagtctgggagtaagtcgtctctctgcggtggcagttatcgcaaccacgatgtccattgagtgggggattctggaaacgaactccatttttgctgcccaggtagcgggaatgaaaattgccacatacttcttccactaccagcttccggtcgcctcttgcgtcattatcagcgtggcgatctcccactttttcgtgcaacgcgcttttgacaaaaaagataaaaatatcaatcacgaacaggcagagcaaaaagctctcgataatgtcccgccgctctattacgccattttacctgtgatgccgttaatcctgatgctcggcagcctgttcctcgcccacgtcgggctgatgcagagtgaactgcatctggtggtggtgatgttactgagtttgactgtgacgatgtttgttgagttcttccgcaagcataacttgcgcgaaacaatggacgatgtgcaggcgttttttgacggcatgggtacgcagtttgccaacgtggtaacgctggtggtcgcgggtgaaatatttgcgaaaggcttaacgacgattggcactgtcgatgcggttatcaggggggcggagcattctggtctgggcggtattggcgtgatgattattatggcgctggtcattgccatttgtgccattgtgatgggctctggcaatgcgccgtttatgagttttgccagtcttattccgaatatcgcagccggactacatgtaccagcggttgtaatgattatgccgatgcattttgccacgacgctagcgcgcgcggttagcccgattactgcggtggtggtcgttacgagtggaattgcaggcgttagcccttttgcggtggtgaagcggacagcgatccccatggcagtcggtttcgtggtgaatatgattgccacaatcacgctattttattaagtcattaaaaagacaaaacaggccgcctgggcctgttttgtattacttcacaacgcgtaatgccggtcgaccaccgcgtggtggctgcggaggttcatcgtcaggatgagtgtcatcatcgtgatctggcttgtcgccatcaataacgctcataacggtttcgttgtctgcgcttgcctcttcatcattcatgatgctggtatcttcatcgtaggcagcttcaggctcaaacatcgtgcctgcgccattttcacgggcgtagatagccagcacggcagccagcggcacagaaacctgacgcggaatgccaccaaagcgcgcgttaaagcgcacctcatcattcgccagttccagattgccgacagcacgcggcgcaatgttgagtacgatttgcccgtcacgcgcatattccataggaacctgcacgccagggagcgtcacatccaccaccaggtgcggcgtgagctggttatccagcaaccactcatagaatgcacgcagcagatagggacgacgtggtgttagctgactcaaatccatacagattaactccggcccagacgcatttcacgttctgcttcagttaaagaagcaaggaaagagtcacgctcaaagacgcgggtcatatagcctttcagctctttcgcacccgggccgctgaactcgatgcccagttgcggcagacgccacagcagcggagcaagatagcaatcgaccaggctgaactcatcgctcaggaagtacggcttctgaccgaagaccggcgcaatcgccagcagttcttcgcgcagttgcttacgtgcggcatctgcttcagaagcactaccgttgatgatggtgttcatcagcgtgtaccagtctttttcgatgcgatgcatgtacagacggctttcaccgcgagctaccgggtaaacaggcatcagtggcggatgcgggaaacgctcatccagatattccataatgatgcgagattcccacagggtcagctcacgatccaccagggtcggaacgctctgattcgggttgaggtcaatcagatcctgaggcggattgtccttttccacgtgttcgatctcgaaacttacacctttctcagccagcacaatgcggacctgatggctatagatgtcagtaggaccggaaaacagcgtcattacgctacgtttgttggcagcgacagccatgaaaacctccaggtatagtcagaatttttactgctaccagccaccaggtggccagtcagaagttgtgttacccaataaggaacgactctctttgttcgaaaatcaaacaaaaaatgagcaatacccgacatttgggcagaaaattggatgatagtttaccagattttgcgaccattgtggtgagtcgatgccggaaatggggaaaaagagatgcgctttagtctgaaatagttgacttagtcccttattggcgatgtggtttttgttttacctgtctgtcaggtggcagcaaaaagcaactttccagtttttacgctgattcagattttagctataaaaaaacccgccgaagcgggttttttcgaaaattgttttctgccggagcagaagccaattaacgtttggagaactgcggacgacgacgtgctttacgcagaccgactttcttacgttcaacctgacgagcgtcacgagtaacgaagccagctttacgcagttcagaacgcagggactcgtcgtattccatcagagcgcgggtgataccgtgacggatcgcaccagcctgaccagagataccaccacctttaacggtgatgtacaggtccagtttctcaaccatgtcgaccagttccagcggctgacgaactaccatgcgggcagtttcacgaccgaagtactgttccagagaacgttggttgattacgattttaccgttgcccggtttgatgaaaacgcgagctgcggaacttttgcggcgaccagtgccgtagtattgattttcagccattgcctataatcccgattagatgtcaagaacttgcggttgctgtgccgcgtggttgtgctcgttacccgcgtaaactttcagtttacggaacatagcacgacccagcgggccttttggcaacatgcctttaaccgcgatttcaatcacacgctcaggacggcgagcaatcatctcttcaaaggtcgcttgtttgataccaccgatgtggccggtgtggtgatagtacactttgtcagtacgcttgttgccggttacagcaactttgtcagcgttcagaacgatgatgtaatcaccggtatctacgtgcggagtgtattccgctttgtgcttaccgcgcaggcgacgagccagttcagtagccagacggcccagagttttaccggtcgcgtcaacaacataccagtcgcgttttacggtttctggtttagctgtaaaagttttcattaaaagcttacccaataaatagttacacgttggtgaacacccaaacgtcttcaattgttgaggttcacacgacaaagtccggcaaacctaccccttcgaatagcctatgccagcacacaaaaagttttgggaaaaaaactttcttgtaacgtggggtcgcaggattatagagaagtcggggtcaaagatcgacccctttttgtgatttgtgacaggttttaacccgccaaatgctcgcgcttcagatactcttcgctttgcatctcttgcagacgactcaggcaacgctggaactcaaacttcagccgatcgccctgataaatttcatacagcggcacttctgcactcaccactaatttgacatggcgctcgtaaaactcatccaccagcgcaataaagcgccgcgcttcgctctccatcaaccgcgtcataactggtacatcaaacaacatgaccgtatgaaagagacgactgagcgcaatatagtcatgctgactgcgggcgtcgacgcacagcgtagtaaaagagaccgccagcgtctggttctcgacgcccattgttgctaatggccgatggttgatttctaacgtcggactattttctcgtttcccccccgccagcgccaaccatagtttatccatttgcgcccgggtttcatcgtgaagtgggctaagccacagatgcgcctgagtgagtgtacgcagacgataatcaacaccagcgtccacgttcattacatcacaatgctgtttaatggcatcgattgcaggcagaaaacgcgcacgttgcaggccatttcgataaagttcatccggcggaatattactcgtcgctaccagggtaataccgcgagcgaacagggctttcatcagaccgccaagtagcatggcatcggtaatatcagaaacaaaaaattcgtcaaaacagagcacgtcagtttcggctttaaagcgatcggcaataatttccagcggatcggtctgcccctgtaaggcagttagctcttcatgcacccgcagcataaaacggtgaaagtgcaggcgctgtttccgctctcccggcaggctttgatagaaaaggtccatcagccaggttttcccgcgtcctacaccgccccacatatataagccacgcactggcgtatgctttgtgtcttcgcgtttaccccacagcttaccgacccgcgccattagcccactcgtcctgggggctggtggcgtgctattgatgagttcctgataaataatttccaggcggctgacggcctctttttgaacgtcgtcgggttgatggctgccttcattaagcgccttcaggtattggcttgttggggtaacgctttgcatgatcttattgttattccttgaataatcggtgcgccgttgttcacggttgacgaaaaaaaggccgttctacactacgcgatatgcagtcgggattccacttctgtggaattaacggttatagtggcataatcagccgcaggcatggagcctgaagccaacaccctacggaaacaaaagacaacgggagatgttcatgacctgggaatatgcgctaattgggttagtcgtcggcatcattattggtgctgtggccatgcgttttggtaatcgtaaactacgccagcaacaggcgttgcagtacgaactggaaaagaataaagctgaactggacgagtatcgcgaagagctggttagccactttgcccgcagcgcggaattactggataccatggcgcacgactatcgccagctgtatcagcacatggcaaaaagctccagcagcctgctgccggaactgtctgctgaagcaaacccgttccgtaatcgtctggcagagtctgaagccagcaacgatcaggcaccggtgcagatgcctcgcgactattctgaaggcgcatccggcctgctgcgtactggcgcgaagcgcgactaatttatttttcgggcgcagccattgcgccctcctcttctctccctccccgactatcatttaatctggtgtctcattgttagccgtctgaaaattcaataacatcaaactgttttgaatctcttttcttatcattcaggtacgagagcaggaataatgaaaaaacaaacccagctgttgagtgcattagcgttaagtgtcgggttaactctcagcgcgagttttcaggccgtcgcgagcattccaggccaggttgccgatcaggcccctctccccagtctggctccaatgctggaaaaagtgcttccggcagtggtgagcgtacgggtggaaggaacggccagtcagggacagaaaatcccggaagaattcaaaaagttttttggtgatgatttaccggatcaacctgcacaacccttcgaaggtttaggctccggtgtcatcatcaacgccagtaaaggctatgtgctgaccaacaaccatgtgattaatcaggcacagaaaatcagtattcagctcaatgatgggcgcgagtttgatgcaaaactgattggtagcgatgaccagagcgatatcgccctgttacaaattcaaaacccgagcaaattaacgcaaatcgctattgccgactccgataaattgcgcgtcggtgattttgccgtagcggtcggtaacccatttggccttgggcaaaccgccacctctggcattgtttccgcattaggccgcagcgggttgaatcttgaaggtctggaaaactttatccagacagatgcttccattaaccgcggtaactccggcggtgcactattaaaccttaacggtgagttaattggcatcaacactgcaatccttgcgcctggcggcgggagcgtcgggattggatttgccatccccagtaatatggcgcgaacactggcgcagcagcttatcgactttggtgaaatcaaacgcggtttgttaggcatcaaaggcaccgagatgagtgccgatatcgccaaagccttcaaccttgacgtgcagcgtggcgcgtttgtcagcgaagtgttgccaggttctggcagcgcaaaagcgggcgtcaaagcgggcgatattattaccagcctcaacggcaaaccgctgaatagctttgctgagttgcgctctcgtatcgcgaccaccgagccgggcacgaaagtgaagcttggcctgctgcgtaacggcaaaccactggaagtagaagtgacgctcgataccagcacctctagcagcgccagcgctgaaatgatcacgccagcgctggaaggtgcaacgttgagcgatggtcagctaaaagatggcggcaaaggtattaaaatcgatgaagttgtcaaaggaagcccagctgctcaggctggcttgcaaaaagacgatgtgatcattggcgtcaaccgcgatcgggtgaacagcattgctgaaatgcgtaaagtgctggcggcaaaaccggccatcatcgccctgcaaattgtacgcggcaatgaaagcatctatctgctgatgcgttaatgtcgtaaaccgggcatcaggcttacgtgtgatgtccggttaactcgtggtatgctgctgccgttcccttttttaatgacgcctccatcatgtttgtgaagctcttacgttccgttgcgattggattaattgtcggcgctattctgctggttgccatgcctagcctgcgcagccttaacccgctttccactccgcaatttgacagtaccgatgagacgcctgccagctataatctggcggttcgccgcgccgcgccagcggtggttaacgtttacaaccgtggtttgaacaccaactctcacaaccagcttgagatccgcaccctgggatccggtgtaatcatggatcaacgcggttatatcatcaccaataaacacgtcatcaacgacgccgatcagatcatcgtcgccttacaggatggacgtgtatttgaagcattgctggtgggatctgactctctaaccgatctggcggtacttaaaattaatgccactggcggtttacctaccattccaattaatgcacgtcgcgtaccgcacattggcgacgtagtactggcgatcggtaacccgtacaacctcgggcagaccattacccaggggattattagtgccacgggtcgaatcggtctgaacccgaccgggcggcaaaacttcctccaaaccgatgcttccattaaccacggtaactctggcggcgcgctggtgaacagcctgggcgaactgatgggcattaatacgctgagctttgataagagtaacgatggcgaaacgccggaaggtatcggctttgcgattcctttccagttagcaaccaaaattatggataagctgatccgcgatggtcgcgtgatccgcggctacattggtatcggcggacgtgagatcgcaccactgcacgcgcagggcggtggtatagatcaactgcaagggatcgtggttaatgaagtgagtcctgacggcccggcggcgaatgcgggtattcaggtcaacgatctgattattagcgtggataacaaaccggccatctctgctctggagacgatggatcaggtggcggaaattcgccctggtagcgtgatccctgtagtagtgatgcgtgatgataagcagttaacgctgcaggtcaccattcaggaatatccggcaaccaattaagtcgtgcgctcaaaacaaaaaaccggagtctgtgctccggttttttattatccgctaatcaattacttattaacgaactcttcgcccagggcgatatctttcttcagcgtatccagcataccttccagcgcgttctgttcaaatgcgctcagggtaccgatagatttacgctcttccacgccgtttttacccagcagcagcggttgagagaagaaacgggcgtactgaccgtcgccttcaacgtaggcacattcgacaacgccttgttcgccctgcagtgcacgaaccagagacagaccaaaacgtgcagctgcctggcccatagacagggttgcagacccgccaccggccttcgcttcaaccacttcagtacccgcgttctggatgcgtttggtcagatcagccacttcctgctcggtaaaactaacgccaggaacctgactcagcagcggcagaatggtaacaccagagtgaccgccaataaccggcacttcaacttcgcctggctgtttgcctttcagttccgcaacaaaggtgttggaacgaatgatatccagcgtggtaacgccgaacagtttgtttttgtcataaacaccggcttttttcagcacttcagcagcaattgcaactgtggtgttaaccgggttagtgataataccaatgcacgctttcgggcaggttttcgcaacttgctgtaccaggtttttcacgatgccggcgttaacgttaaacaggtcggaacgatccatacccggtttacgcgctacgcctgcagagataagaacgacatctgcgccttccagcgccggagtcgcatcttcaccagaaaaacctttgattttcacagcagtagggatatggctcagatcgacagccacaccgggagtcactggagcgatatcatacagagagagttcactaccactaggcagttgggtttttaacagtagtgcaagcgcctggccaataccgccagcagcgccgaggactgcgactttcatcctaaactccttattatattgataaactaagatatgttgctccgctgccgcgaccttaatccacaaaattgccgtttacaatgaccacatctcaagaatgtgtagtcacgcaagtttagcgtttatgcatttaattgccgtaatcaggaacctaacttacgtaattaacagtcgcttatgcattagcgcaacattccaacaggtggtgacaatataccctaccgttcagccaaaacaacatcaatttgataacaattaatttacttttaagcagaatttgcatgccgtgacgcaggcatgtttctcaataacgaaatttgataaaatcccgctctttcataacattatttcagccttcttcagggctgactgtttgcataaaaattcatctgtatgcacaataatgttgtatcaaccaccatatcgggtgacttatgcgaagcagcgctaagcaagaagaactagttaaagcatttaaagcattacttaaagaagagaaatttagctcccagggcgaaatcgtcgccgcgttgcaggagcaaggctttgacaatattaatcagtctaaagtcagccggatgttgaccaagtttggtgctgtacgtacacgcaatgccaaaatggaaatggtttactgcctgccagctgaactgggtgtaccaaccacctccagtccattgaagaatctggtgctggatatcgactacaacgatgcagttgtcgtgattcataccagccctggcgcggcgcagttaattgctcgcctgctggacagtctgggcaaagcagaaggtattctgggcaccatcgctggcgatgacaccatctttaccacccctgctaacggtttcacagtcaaagacctgtacgaagcgattttagagctgttcgaccaggagctttaatctctgccccgtcgtttctgacggcggggaaaatgttgcttatccctctcaaccccctgctttcccctgcgattaatttaacgaatagtgcgttttactgcgacatgtcattcacacaatgaatacataaggtaaaaaaagcacattatgcaaaattcattatctaattgaaaaaactagaattaacgataaataaccgtatttttaattcttttttgttattaaaattcacatttttaacacttagtatcaactgaaacagttagcgcggtattaattagctcaataattagtgtatacttgattttgtgatatgggtcacgaaacaaaggcccagctaaaagattatgtcgaggtaaaaatcatgaaaatcaaaaccactgttgctgcattaagcgtactttctgttctctctttcggtgcattcgctgccgactccattgatgctgcacaagcacaaaatcgtgaagcaatcgggaccgtatccgtaagtggtgtggcgtctagcccaatggatatgcgtgaaatgctgaacaaaaaagcggaagagaaaggcgcaacggcctaccagattactgaagctcgtagcggtgacacctggcacgctacggctgaactgtacaaataaaccctcatcgtcttgtccgacgatattgcccccggttcgggggcttttttttgcgttaatgacgaacattaaaacgcaaatgcccttccagctcttcctctgcctcatcaaacagcaatattaacgcgccaaaacggcgacgcgttttctctcccagatgaacaaattcaatctcaagtggtagcggcaggacatcgttcattaacacatcccatagactgtcgagatcgcgtaccttatctttcgccagaccaaaggtttggctaaagtcacgataaaaatcctcctgactctcaatctcatcaaaatcaaaggtataaatattcatctgttgccaccgtcacgtttcgcggcgagttctgccgtgcatcgctaagtatagccatgaaaaaaccgacgcttttggcgtcggttttgacttaactatcggtcaacgcatgttgatacttatggagcatccccgccagccgatttaccggttccgtcacctgcggtggcgcttgccagatgcgtagcttttcctggtagatttccagttcttccagcaactggccaaagtaccgacgacgtttatcatcgctacgggcagatatcacatggtctgctgtgcggcgcatttgtcggtgaaacgcgcttaaatcctcgttaaccgggatcggtgcatcacgcaggcgctggtgcgcgataatcatcgtcagcgccaggcgaaatttcggcaaatcccctgggaacttattcatcagcaaaaacagctgctgataaagtgccgggaggtggttctctttacgacgtgccacattggtagtcatcgcggaaacagcggcagaaacaaactgattaagcagtacacgtccggtcctgtcgcggcttttatcccgcaccagcaaaataacggtgaacgcgagcacacagccgacgatttgccctaatgcgctgtcgagaaactgactgaaatggaaagtcatcgggttatccagcacgataatatttatggtgctggccagtgcccccatgctgcccagtcgccgtttctgtacttctataccgaggaagaatcccagcactgccaggctaatgcacagcagcaacatgctctgttgggtattagggataatcaccaaaaagtagagcagccctaacggcagcgcggccagcgtcccgtagataaagtcgatcgccaccatgcgtggattcggcaaacgcattgccagactcgtcactaccgcaatcatcaccattgcaccactgccggaagtccagcccgtccacagccagaaaagcgtgcccagaatgcaggaaagtgtggttcgccagaagttacccattgcatgatgacgttcggcactctctacttttacttccggttcgccttgcaggatctcttcttcggtggcgttgatttttgtgttactgataacgccgcgcttgagaagctgataacgcgttgccgccgcgacccagctataaatggtgacaggcgtttcccgttccccggtccaggcgataactctccgcaggcgtttgagctgcttgtggacgtcctgcgcggtttctaccggcgtgtcaaaaaattcgcggaaagtatcagtgatcaattccgggcgcgtattctgaataagataagtttcgcaggattgggtaatcagcgtcaggcttagcgtattgatcgcttttaaacgtcgattggcccgcgcccagcgggaagattccatattcaggttgctgcgcatgccttgtagcgccgtggtgcgtcgcaccaggtcgccccaggctttatcgacaacttcaccatcgccatgcttgatacagagttgcattaattgatattgcgcgaccagcaaactttccagctctcgatccacttcttgtttgatgcttcgcggagaaaagagcaaatccgccataatcgcacacacaataccgataacgatctcgctacaacgttcgacggcaaactgcggcgtaagcaatggttccggctgaatggtgatcacaatgatcagcgcggtataaccggccagcccccacgcatagctgttttctattcgtaccaggctggatatccaggtacaaaaaccggcccagatacagcacaccagaatcatcaataatggtgcgcggatcatcgcaatgatgatcaccagtccggcaatacagccaataaatgtgccgatgatgcgcaaaaagccacgatagcgaatagcgccagaatacggttcacctcccgcagcaaaggccgtaccggcggcaacaatcgccgctgtcagtaccgcccagcgtggcgtttccagctggaagtgaaagccaacaaacagcgccagtacaatggcggtcgccagttttaccgcaaagcgaatatgttggttagcaatggagaaaatacccatcgtgattaaccaaactcacgcaggcgatgggccattttacggaagaagctatcctggctttcgtcgcgatcttgtttgccagtgaccaccactgtagcagtggtgcccgcaggccagatgttctcttgctggttgtcgagacgaatacgaaccggaacacgttgcgcaagacgcacccattcaaggttagagtctatagtcgccatccctttgtcgtcacgcgtgctgctggcgttggtgacccctgcggcaacactatcaacagtccctttcagcactttgttactgccaagcggcgtgatctctgcacgataccccggacgcaccccttccagcttagtttcttccatataggccagtacatagaaggagttctgtttcaccagcgcaaccgccgtacttcctcgagtaataaactcaccggtatagacgttgaggttggtcacccagccatctgctggcgcgcggatcaccgtgcgttcaagatccagttttgccagatcgcgggtcgcctgcgctttcgctaactgatgcagaaccgtttgtagtacgttgttggcctggtcgatctcttcgcgagacatcgcctgcacaccgagacggttacgacgtccggcctcctggcgtttctcctgtgccagtacctgataataagcaacatcggcttgcgcttcctcaagcgccttttgatagcgcggctggtcgatggtgaacagtatctgtccttttttcaccagctggttatcatgaacattcacctgggtaatgagtccagaaacgtccggcgcgatcgcaacgacgtcagcgctaaagcgcgcgtcacgcgtccagggggattcggtgtaatagacccaggcattaaaaattgcgatgaaggccagaatgactaatacgaccgtgatggccgtacgggagaattttcttattagtgttttcacttcaacctcaaacgaacagtcggcttatcaaataaaacaagcagcaatagagcgcggtgttgaacaacgccggatgccagacaaagtcgtagatacctgttggcacaagtacccggcgcaccagccagaaaatcgccagacttaaaagcaattcaaaaaatatcggtgggaaggacagcccaaacaccacgataacgggaaacagactcatgttgaccttggttgtaaagagagagcaggcgttattattttcagcatctgtcgccgcagagaagggcatggaaagccgggcgagagcaacattgctgtagattgatatttaatatattagcgtaactgttatgctgttatctatattatgtgatctaaatcacttttaagtcagagtgaataatggaacgactaaaacgcatgagcgtgtttgccaaagtagttgaatttggctcttttaccgccgccgccagacagctacagatgagcgttagctccatcagtcagacggtaagtaaactggaagatgagttgcaggtaaagctgttaaaccgtagcacacgcagcattggcctgaccgaagccggtagaatttactaccagggctgccgtcgtatgcttcatgaagtgcaggatgttcatgagcaactgtatgccttcaataacacccccatcgggacgctacgcattggctgttctagtactatggcacaaaatgttctcgccgggctgacagccaaaatgctgaaagaatacccaggtttgagcgtcaatctggttaccggaattccagcccccgacctgattgccgacggtctggatgtggtgatccgcgtcggcgcgttgcaggattccagcctgttttcccgccgtctgggcgcgatgccaatggtggtgtgcgccgcgaaaagctatctcacacaatacggcataccggaaaaacccgccgatttgagtagtcatagttggcttgaatacagcgtgcggcccgacaatgaatttgaactgatcgcaccggaagggatcagcactcgcctgatcccacaaggaagatttgtgactaatgatccgatgacgctggtgcgctggctgacggcgggtgccgggatcgcctacgtgccgctgatgtgggtgatcaacgagatcaatcgtggggagctggagatcctgctgccgcgttaccagagtgatccacgcccggtttatgcgttatataccgaaaaagataagctgccgctgaaggtacaggtcgtgatcaacagcctgacggattattttgttgaggtcggtaaattgtttcaggagatgcacgggcgcgggaaagagaagtaattcatattgtactgttacgttgtacaaacctgtgccaacgggttcccctcaccctaaccctcaccccaaaggggcgaggggaccgttcgtgcacgtagaaagattaattatccttctgaaaatagtgaaattattacgcagtaccgccaacagtcaggttatcgactttcaacgttggctggcccacgccaaccggcaaactttgcccttctttaccgcagacacccacgccgttatccagtttcaggtcgttgccaaccatgctaatctgctgcatggtttcgataccggaaccaatcaacgttgcgcctttcaccggcttcgttactttaccgttttcaatcagatatgcttcactagtggagaaaacgaatttgccggaggtgatatccacctgaccgccaccaaagttcggtgcatagataccgtactcaacggattcaataatttcctgcggggtgcttttacccggcagcatataggtgttggtcatacgcggcatgggcagatgggcgtaggattcacggcgaccgttgccagtcggcgtcatccccatcaaacgcgcgttgagtttatcctgcatgtagcctttcagaatgccgttctcaatcagcacgttgtactggcctggcgtaccttcgtcatcaatcgccacgctacctcggcgatcgaccatcgtgccatcatcaaccacggtacacagttcactagccaccagctccccgacctgtccactaaatacactagtgccacggcggttgaagtcgccttccagaccgtgaccaaccgcttcatgcaacagcacgcccggccaacctgcgccaagtactaccggcatggtgcccgctggtgcagcaacggcagaaagattgaccagcgccatacgcactgcttcttttgcccatgcatccgcacggacttcgccgtcgagatcggcaaggaagaattcataaccaaaacgaccgccgccgccactggcaccgcgttcgcgtttgccatcttcttcgacgagaacgctcacggaaagacgcaccagcggacggacatccgccgctagcgtgccgtcggtggccgcaaccaaaattaattcatagacaccactgaggctggcagtcacttcctgtacgcgcttgtccgcttcgcgggcaaccttatcgacgcgacgcaggatatccagcttctcttcacggctcatgctttgcagcggatctacgctggtatacaacgggctatgctctaccgcgcccagcgtctgtactttaccatcaccactatcacggacgatggtgcgcgccgcttgcgcactctgttccagcgccagcaggctgatttggtcagcgtaagcaaatccggttttttcaccgctgattgcacgcacaccaacgccctgatcgatgttgtaagaaccatctttaataatgcggtcttctaaaacccaggattcgtgatagctgctctgaaaatagagatcgccataatcaaggcgacgttcggccagttgaccgaggatcgcgaacaagtcctgatgtttcaggccgttcgccgctagcaattgttcacttaccaggttaagactcatcgtttttgctactcgttagttactgcagtagaggattttttacggctgccggatgcggcgtgaacgccctatccagcctacggttatgttccggtttgtaggcctgataagacgcacagcgtcgcatcaggcaacggctgtcggatgcggcgtaaacgccttatccgacctacggttatgttccgtttgtaggcctgataagacgcacagcgtcgcatcaggcaacggctgccggatgcggcgtaaacgccttatccgacctacggttatgttccgtttgtaggcctgataagacgcacagcgtcgcatcaggcaacggctgccggatgcggcgtgaacgccctatccgacctacggttatgttctggctcgttggcctttggcaacgattatcctatgagattggggcaattacgcgccctcgtcaaatcattgcgctttttctttacgcggttggcgcaacacttcgttgatttgcggatcgtccagcggaccgctaatgtgatagcgcaaaatggagactttgctccacagcggccccagcactttactggcggcaaacactgccgcgccaacaatggggttaaccgcaaaagccgcagccacgcccaccgtcgcagaaatctctggtgcgacaaccgcttccatattcaggtcgcgacgtaccagatttacgctccctttcatggcgatatccgcctccaggccatccaccagcgtgtcgtcggtgtgcataacgccgtctttaatccacgcggtgctgcgaatggagtcaaaatagaacccttcgccaaaagtgtctctgaaatcaaaacgcagcttacgcatcagggcatctacgctcaataagcgcagcaattgcccggcatgtccggtattgatttcggtaatttcgcctttacccagttgagtatgaatgatgccattcaacgtcgcttcatctggctgccagggtgctttgcgccagtgtaaatcgtaatccacattaaaactgctctggcgtatgggcgtcgtgacaccaaaaaattctgcggcggcatcaattttctgcccgcgcagttttcctttcaggctggtacgttcattccccggattattaacccattcaccatcggcagtaagccggctgaaaccagtatcaatcagtccattggtcagcgttaacgtatcgccagaaatggtgatatcactgtcaatgcgaccgaatttttgcccccagaaccagcactctgtgcatcgtatttgggcgtccggccagccacggaagttaatgcgctccgttgtcgggaaaggactactcggcgtactatcaccacgagttttcgccacgctcgggttgtaataaagatatttgatattcgccagccacggcgcgttattacgcatcgctagcgtggcgttgatttcacgcccttgcgcttcaaccagggtgccatttgccgtcggttggctaacaatactcaggttattccattgctgatttcccagactcaacataggcgtacgtaacgttatgtgttgtgggaaactcgctgcaccaccgacactctccgcagcgcctttctggaacagggccagccactcggcaccattcatcggcggcatattgagttcaacgccactttgttccggcaacggcgggagcgttttactgtctgccgcccaaatagcacgatcgagcgtcagcttttgaccgagcaaccagcggctattgaaatgattatccgcaccagcctgtccggttaattcaaagctgttgagattgccatcaaccttaacgtttaccgctagtggttcacccgcaggtttggctaacggactaggtaagtgactgctcacattctttagatcgccgttcagctctatgttataggtcgcaccagcatgataaggcagatcaatgcccactttaccatcccacgccacgctgccactcaatgcttcgttcaccgcttcaggcagaacgccggttttcgccggttgccagttaccgttgaggtttaccgctacctggtaggcttttgccccttctttggtggaaaaatccacgttcaacggctgattaaaccagcttgctgtcagtggttcactttgcagatcgctattgataaagctgaatttaccgctcaaatttttcagggtgctgtcgagtggtttgataaacagactgttattacgcagcgtcacttcacctttcgcggttaccagttcgccgttcagcgggatatcaagatgtaagcgagcattcacatcgccgtcgagctggagttcttgcagggtcgcacccagagaatctttcagcggtgtctcatcaaagtaagggccaacggctttacccggacctttaatgtcagcgtcaatcagcagtttttctttactgtagtcagggatcactgcggtaagattactcgcgcgcacgccgcccagattaacgccatcggttttcatccataaaccgtcgttaataaagtccagttcaatatcaaggttagttaatgcaggccagtccggctggaaggcaaacttcgcgttgcgcagcggcaccagcacttcaaactgaccttcgttgtgtttataggggaagagttgcggattgccaccataaaccagcgtcgcgttatccgcttcaccgccctgaatcgcgccacttaagtaatcaaccaggtctttacccatcaagttttccgggaaatagcgccaggcttgactaccatcatcggtactgatgccagccagaatacccagccagggttcatcgttagcaggttgcaggtaacgaaaaccgccgcgcgcatggacggctttggctttaacgtcaatattacgcccatccagctggaaacctttgttattgttcagccagcttatagttgcctggccgtcggcgatttctagtggcgcacggaataccgtttcgtaaggcatctttgcctgcttcatgctcgcggtaagcaaaccattttcaacgctgccggaaagcgtcccggagaagtgttccgcacccggtaataatttccattgcttccaggccagatcgctccagcttgcctgaaaacgggtcttgtctgccgcctgaagcgggatatccagcgccagagtgttaatcttgccgctcggttgtgtggagcgccaaacatcacccagtgcaggactaagtttcgcggccagcgggcgtatgccctccaggcctgccagctccagattactggcgcgaatccggagttcgtcactgcgtttattgtctttgccgccaacgtcctgttccggtatccaggccagcgtcaatgctccgctcggccagggtttgccgtccatcgtgatccgtgtatcgggaatagagaactgccagcccggattttcacgcgtaatatgcgcggtcagattatccacgctcagcgtatgcgtttgcttctcgcccaaccagctggcaccgccctgtttcagccagacgtcaccgccggttacatcgcctttgtcgatcgtcatccagccttcaagggagaactgtgccgtttccagcgcaatattgtcctgcatccatttaccgagccacggcttcaggtcgatgtcatccgcctggagccagacgcgaccattgcttaacaacccctcatcatcgcgcaaatccatgcgcacctgcatcacgccgtgctgtccggtaaggctggagaggcttaccaggccttccgcacggtgtcgacgtggatcgttcagccaggtgagttgtgggatcgccagctcggcgcgctgaccggatggcgtcaggaaactgacttcactgtcgcgaagatcgaaatggtcaaattgacgaagaaacagatcgctgatgtgactggcttccagactgtcatcactaccaccgctggtgataggagtgttggtgcgaaagcgcagctgccagaaagtgaggtcgcgaaactgccagcgcatatgtaacaggctctgccagacatccagcgccagagtaacgcgtttaacgctaaattcgccgccatcttttagttctgcacggatgtcgtgtgcttcaagcgtcgggccaaaattctgccagctggcactgagctgactggcttctaccggcatgccagtcgcggattctattttgttgaggatttccggacgccaggcgtcaagatgcggtaaagcaatacgcaggccgctaaccagcagggcagcgatcacaacgagcgcggctccagtaagcagtaaaatccccggcaatcgcctcacccgtcactccttgtctgctaaaaatgtgactcaaaaaccctttgccggatggcggcccagcatctgtttacatcattacgacgtcaaactgctcctggttatagagcggttcaatttgtactttaacctgtttgccaacgaaaatttccacttccgccaggctgtgactctcttcgcctttcaaggcttcagctactgccggagaagcatagaccaggaaacggtcggagtcgtaagcatggtggacacgaacaatctcgcgcatgatttcatagcataccgtttccacggttttcaccgttccgcgaccgtggcaggttgggcattcgttacacagtacgtgctcaatgctttcgcgggtgcgtttacgcgtcatctccaccagccccagcgcgctaaaaccattaacgctggttttcacccggtctttgctcaacgcctgctccaggctgtgcagcactcggcggcggtgatcttcattattcatatcgatgaaatcaataatgataatcccgcccagattacgcaaccgtaactggcgagcgatagcctgcgtcgcttcaatattggtattgaaaatggtgtcgtccagattgcgatgaccgacaaacgctccggtattgatgtccacggtggtcatcgcttcggtctggtcgataatgagataaccaccggatttcagttctactttgcgttccagcgctcgctggatttcgttttcgacatcaaagagatcgaaaatcggctggcgtcctgtgtaatgctccagcttgcttgtcatctcgggaatgtactcgctggtgaactcaagtaacgcttcgtaagtcaggcgactgtcaacgcgaatgcggtccagttcggcatcggcgaaatcacgcagaacacgctgcgccagcgccagttcgccgtacagctgataacgggtctgcgggcgttttttacgctccataactttggtccagacgcgtttcagataagcggcatcggaggccagttcagcctcgccaaccccttccgctgcggtacggatgataaacccgccctgctcgtcgcaatactctgcgaccacttttttcaggcgttcacgttcactttcgctttcaatacgttgggaaaccccaacgtgagaagcccctggcataaacaccagatagcgagaagggagcgtgatatcggtggtcaggcgcgcacctttagtgccaagcggatctttcaccacctgcaccatcagatcttgcccctgacgaaccagttcgctgatgtcgcgcaccgtgaattgcttttgttcttcacccgccacacattcggtgtgcggcatgatgtcggatgcatgaagaaacgcggctttatccagcccaatatctacaaaagccgcctgcatacccggaagtacacgacttacacgacccttgtagatattgcctactattccgcgtcgcgcctcacgttcaatatgaatttcctgcagaataccgccatcaatatacgccactcgcgtttcgctaggcgttacgtttactaacaattcagccgtcatgtttatcccttttctcacgcagtgcgttaaaattacttaataattcatacgtttcaaccagcggtaagccgactacggcgtgatagctgccatttatcttcctgacaaaacagccacccagcccctgaataccgtatgcacctgctttatctaacggttcatcgctggcgacatagcccgcgatgtcttcgtctgttaacgttctgaaagtcacatcggtgaccaccaggcaatcgagaatgtgctggctgtcggccaacgccactgctgtcatcacctgatgggtctgaccgcttaatttgcgcaacatctgcgccgcatgctctgcgtcgcgcggtttctccagcacttctccgttcaggataacgatagtatccgcacccagcaccgggagatccttcgccgtttgcgcgacacctgcccgtgctttctcgcgcgccagacgcacaacatactgctgcgcgctctcctgcggctgacgctgctcctcaatgcccgtaacaatacgttcaaaggtcacgccaagttgcgcaagtaactcctgacgacgcggagaaccggaagctaaatacagagaagtcatagaaacctttattgcactgcaaactgctgacggactttgcgcatcagcaagaaaatccacggccagagcaccccattgactacactactccagaacacttccggtctgaaagagacgttaatcactaaaaactctgcccagaaaacaataatatccaccaccaggctaagcaacatgacgaccagcgcctgctgccataatgcgaggttgcggaaaagctggtatttcagcgccaccaggtaagcaatgatgctcatcgccaatacgcgtacgccaagcgtgctgccgctgatcagatccagtatggcacccatcacaaaacctgtgcccacatttacgcgatgaggcaaggccaggatccaatacaacaagatgagtaacacccagtttggccggaaaacaatcaggttatccggccagggcatgatttgcagcaacagcgcaatgaggaaagagagccagattacccagcgtccctggctacgatagctcgccactattgccctcccggcgcacgttattgccctcccggcgcacgcgcaggcggttgagcaccactttgcggcggcgtagccctttgtggagagcgattagcagcaggctgtgtcggcgcagcaggcgcagtagctgcatttcctgtcgccggttgctgcggagtcggctgagcgatccccgttgccggttcaggtaactttggccccatcgcgtctgggctaggcaatacctgcggcatcatctgcatcagacgttcattagcaacacgatgcacctcttccggcgtcatcgggttagcgccgttacgatctgccccccacagcagcagcagataacgcaaacgttgcagccctgcagtcggacgcgcctgaatcacagtataagcgcgctgggtatcgagttttacggaagagacaaccgcgaccggatagccttccgggaaacgaccgcccagaccggaagtcaccagcacatcaccaacacgaatatccgtattcgccggcagatgctcaagctgcaaatcatccgtacaaccgttaccggctgcaattacgcggatatcgttgcgcagcacctggattggcagcgcgtgggtcgcatcacaaatcagcagcacgcgactggtcagtttagcgacggccaccacctgaccaacaacacctttgtcgctgatgaccggctggccttcataaacgccattaacgctacctttatcgataacaacttgatcgctataaggatcgttaaccgtggagataacctgagtcaccattttctgctcatcctgacgcagcggggaacccagcagctcgcgcagacgcgcgttctcctgtttgtattgtccaagcatcagcagttcactgtttttcagcaacagttcctgacgtaacgcccggttttcaagttctaattggtcacggctggccagcgtctggcttacgccatccagcaattcacgaggagcattggaaacaaagtagaaaggactgacggcggtatccatataagtacggatttgactgaacgtccccaggcggctgtcggcaataataatgccgagcgccaccagcaccgccagaataaggcgaatctgtaggctcgggccacggctaaaaattggcttcataagttatgcgtattctcgtatcagaccaggcagggtaaacagacacttcccctgcctgcatccgattactcttcgctgaacaggtcgccgccgtgcatgtcgatcatttccagcgctttgccgccaccgcgcgccacacaggtcagcgggtcttcagcaacaacgactggaatgccggtttcttccattaacaaacggtcaaggttacgcagcagtgcgccaccaccggtgagcaccatgccgcgctcggagatgtcggaagccagttccggcgggcactgttccagtgcaaccattaccgcgctcacaataccggtcagcggttcctgcagtgcttcgaggatttcattggagttcagggtaaaaccgcgtggaacaccttctgccaggttacggccacgaacttcgatttcacggacttcatcgcccggataagcgctaccgatttcgtgcttgatacgttctgcggtggcttcaccgatcagagaaccgtaattacgacgcacatagttgatgatagcttcgtcgaaacggtcaccaccaatgcgcacagaagaggagtaaaccacaccgttcaaggagataacagcaacttcagtggtaccaccaccgatatcaaccaccatagaaccggtcgcttcagaaaccggcaggccagcaccaattgcggcagccatcggttcttcaatcaggaagacttcacgggcaccagcgccctgcgcggattcacgaattgcgcggcgttcaacctgggtcgcgccaaccggcacacaaaccagaacgcgcgggcttggacgcataaagctgttgctgtgcacttgtttgatgaagtgctggagcattttttcagtcacgaagaagtcggcgataacgccgtctttcattgggcgaatggcagcaatattgcccggcgtacggcccagcatctgcttcgcgtcatgacctactgcagctacgcttttcggactaccggcacgatcctgacgaatggccaccacggaaggctcattcaatacgatgccttgtccttttacataaatgagggtattcgcagtacccaggtcaatggacaagtcattggaaaacatgccacgaaattttttcaacatactaagggataatcctgaaagctggggcggaaaagaaaatccgcttactttaccaaccacacgcagcagcgacaaggcgcaaaaatcatctgctacggtgaaaattagtgcagttcgtttcctttgttacaaatctctgcctgagtccagaaaggcttaatgcatcagcagcattcctcgcctgtttgcaaccgcgtaaggtcattcatctgcatatgtgctgcaacaatctggcgagcagacaagcacactcccatgagacgcagcgcgcattattctacgtgaaaacggattaaacggcaggttaaacgctgtatctttgactatattttttcacgttagtatcaagtggctgactggacgcgaaaaaatccccttgcccgcctgtaacaccgcgctgaatcagggtctgccactcgcttcggctacgcacgccggtggcgtaaacctgggtgctggtcccggagcaggcttccaccaggctttgaaccagcagctggttctccgttcgcttctcaatgtttctgaccagccccggatggagcttgagtaactcaacattaagttctttgatccaactggtacttaccagcgtcaaaccagcctggttgacggctacccgtacccctaaagcattcactaaacgaataacaggttgtaaacgactgatatgttgacctacatcggcctctgcaagttcaataattatgcgttttcgttgacttttttcacattgcattaacgtatcgcgcagccaacgctgaaaacgcgggcgaatcaggctctcaacggtaacctgaatcgccagattttcctctggccagtaacgcaatagtggaataagacggctgatttgcagacggtcatactcttcgcttaagccaaactgcaagaccatcggcatatgctccgcgctgctaacctcttcattaccatcgaagatgcggcacatgagttcgcgatgatgaacctgaccttcgcgagtaaccgccggtttttgataaaggcgcgggccgccgcgactgagcatttgctcgataagcgtacgccagcgaacattaccgcgtcctttttcaggcaagctgtcatcgtaaatagcccagctattgccgccctgcaatcccgcattacgcgtggcagactctgcatgttccattacctgctcggtatcctgaccactacgccaggcgcagataccaatgtggatcatatcgtcgcgatcgagcattttattgttcggcaaggtatcaacggctttgattaactgaccggcgatgctctctgcctcttttaacgtccggtgcggtaacagcgcagcaaaatcactgcggtggtaacgcgccagcagtgcgccagggtagcgcatcataaatgtgctcagcagattcgtcagagtgaagaactgttcttcaacctggctgtgcccccaggtatcgctcaacatattgaaatccggcagacgaatcatcatcacgatcccgtgggtacctactttctcctgatcttccagtaacgttgctaactgattatcgaaaaagagtcggttattgaggccggttttcacgtcctgggcggcataagagcggatcagcgtatcaagacggctgtgttgttcgcgtgcgttctgaatttcacgaagcagcgtatccagcgcactgctggttctgggcggccattcatagatggttcccaacacattagagccacgctcaccgtttaagatacgagtagcccgggtttccagcaattcttgcccggcaagttgccgttgtaaccagcgtaccgccaggaagagcataacaatgataaagccaatcgcccccgtgagcggcgcggtggtcatcaagctatggaaatagttgcccatcggatcctgataaaccagacgcaagctcatccccggatgctttatcaacggaacgctcagttcgcgaaacagatcgctggagccaactggacgataactaccatttctggccagggtataaacctgtttatcaccatggagcaggtctacacgaacgatatctgcgctcatcattaattcggtaatttgtggccttaatacgctgaagtcattgctcacaaggtgggtatcaatcgccgtcgccaccgcctgaacgcgatgactaaacttatactgaatggcgttgtagaaacttaggctacagcccagcaaagtcacaaaaattgttaacccggtgagcagcgtaacaaaggcgctaaatttcgtcgttaatctcatccttgtgttaactccgatagtgaggaagcgggcatactagcaaatcagatttatctcgcaatttattgcgcttcatcggctttgcttttccattagcgagtatagtcttcagaaattattttccaatccatcatgcacatgaggaccacttatgcaggcgttacttttagaacagcaggacggcaaaactctcgcaagtgtacagactctggacgaaagtcgcctgccggagggcgatgtcacggtcgatgttcactggagcagcctgaactataaagatgcgctggcgattaccggtaagggaaaaatcatccgtaattttccgatgattcctgggatcgattttgccggaactgtacgcaccagcgaagatccgcgttttcatgccggtcaggaggtgttactcactggctggggcgttggtgaaaaccactggggtgggctggcggagcaggcgcgagtgaaaggtgactggctggttgccatgccgcaagggctggacgcgcgtaaagcaatgattatcggtactgccggttttaccgccatgctgtgtgtgatggcgctggaagatgccggtgttcgcccgcaggacggggagattgtcgtgacgggtgccagtggtggcgtcggcagtaccgccgtggcgctgctgcataagttgggttatcaggtcgttgccgtttccggtcgcgaaagtacccatgaatatctgaaaagtttaggtgctagccgtgttctccctcgtgatgagtttgccgaatcccgtcctctggaaaaacaagtctgggctggggcaattgacaccgttggcgacaaagtgctggcaaaagtgctggcgcaaatgaattacggcggctgcgtggcggcctgtggtctggcgggtggttttactctgccaaccacggtcatgccatttattctgcgtaatgtccgtttgcaaggggtggatagtgtaatgacgccaccagaacgccgcgcacaagcctggcagcgactggtcgccgatttaccggaaagtttctatacccaggcggcaaaagagatatctctgagtgaggcaccgaactttgccgaggccatcattaataaccagatccagggtcgcacgctggtgaaggttaactaaccatttagcagggaataataagagagggaactcattttgaaatcattattcaatcggttaacgggaaaagcggttagccggacagctttcgtcgaacaccttggtcaggaagttatacaacatcatccaaactggaaagtcatgatttcgactgaccacaaattgatgcgcattgatactccactaaacagctattattgatacgcctccgtcgcctgttaggtttatgttgctttgcctgggcgacgctacgcttagccccttacttatttctggtaccatggggtgaataatctgattttgtttgactacaaattaatcactcgaacctatttaatgctgagcattgtcaatcggttaattttgcgtgctttagcattcacatctatccagacgatgcagtgaaaattgggtaatccccagcaaccgctgcgtaatgtcgtctatcttgtcgcgatcctggcatccctacattatttgtggtctgtgaagattatctcattgcagcccctcatcttcgcagggctggcttttcagcttttcaccttacgttataagaagttccgtcgatgatggcgctaatttcgtgaattgtgcggcttgttgcaaattacacggtgttgaaggttatttacatgttagctgttgattatcttccctgataagaccagtatttagctgccaattgctacgaaatcgttataatgtgcgacctcgtcctccctgacgcagtttttgcgctgcggaaaaggtgacattggcgcaacgaaggtatattttgttttttgccggaggatagcagcagatcgctgcacaatgtccgtcaagtctaacattgacactctggggcaaaatagaccggcgtcccggcctgctggaatttatcgctatgcatacagctgtcggggcatacgctttacagacggcggtgaaacgcctgtcacaatcacactaaacaaagagtacggaacccactcatggatattcgtaagattaaaaaactgatcgagctggttgaagaaagtggcatctccgaactggaaatttctgaaggcgaagagagtgtacgcattagccgtgcagctcctgccgcaagtttccctgtgatgcaacaagcttacgctgcaccaatgatgcagcagccagctcaatctaacgcagccgctccggcgaccgttccttccatggaagcgccagcagcagcggaaatcagtggtcacatcgtacgttccccgatggttggtactttctaccgcaccccaagcccggacgcaaaagcgttcatcgaagtgggtcagaaagtcaacgtgggcgataccctgtgcatcgttgaagccatgaaaatgatgaaccagatcgaagcggacaaatccggtaccgtgaaagcaattctggtcgaaagtggacaaccggtagaatttgacgagccgctggtcgtcatcgagtaacgaggcgaacatgctggataaaattgttattgccaaccgcggcgagattgcattgcgtattcttcgtgcctgtaaagaactgggcatcaagactgtcgctgtgcactccagcgcggatcgcgatctaaaacacgtattactggcagatgaaacggtctgtattggccctgctccgagtgtaaaaagttatctgaacatcccggcaatcatcagcgccgctgaaatcaccggcgcagtagcaatccatccgggttacggcttcctctccgagaacgccaactttgccgagcaggttgaacgctccggctttatcttcattggcccgaaagcagaaaccattcgcctgatgggcgacaaagtatccgcaatcgcggcgatgaaaaaagcgggcgtcccttgcgtaccgggttctgacggcccgctgggcgacgatatggataaaaaccgtgccattgctaaacgcattggttatccggtgattatcaaagcctccggcggcggcggcggtcgcggtatgcgcgtagtgcgcggcgacgctgaactggcacaatccatctccatgacccgtgcggaagcgaaagctgctttcagcaacgatatggtttacatggagaaatacctggaaaatcctcgccacgtcgagattcaggtactggctgacggtcagggcaacgctatctatctggcggaacgtgactgctccatgcaacgccgccaccagaaagtggtcgaagaagcgccagcaccgggcattaccccggaactgcgtcgctacatcggcgaacgttgcgctaaagcgtgtgttgatatcggctatcgcggtgcaggtactttcgagttcctgttcgaaaacggcgagttctatttcatcgaaatgaacacccgtattcaggtagaacacccggttacagaaatgatcaccggcgttgacctgatcaaagaacagctgcgtatcgctgccggtcaaccgctgagcatcaagcaagaagaagttcacgttcgcggccatgcggtggaatgtcgtatcaacgccgaagatccgaacaccttcctgccaagtccgggcaaaatcacccgtttccacgcacctggcggttttggcgtacgttgggagtctcatatctacgcgggctacaccgtaccgccgtactatgacagtatgatcggtaagctgatttgctacggtgaaaaccgtgacgtggcgattgcccgcatgaagaatgcgctgcaggagctgatcatcgacggtatcaaaaccaacgttgatctgcagatccgcatcatgaatgacgagaacttccagcatggtggcactaacatccactatctggagaaaaaactcggtcttcaggaaaaataagactgctaaagcgtcaaaaggccggattttccggccttttttattactggggatcgacaacccccataaggtacaatccccgctttcttcacccatcagggacaaaaaatggacactcgttttgttcaggcccataaagaggcgcgctgggcgctggggctgacccttttgtatctggcagtttggttagtagccgcttacttatctggcgttgcccccggttttaccggctttccgcgctggtttgagatggcctgcatcctgacgccgctgctgtttattggactgtgctgggcgatggtgaaatttatctatcgcgatatcccactggaggatgacgatgcagcttgaagtaattctaccgctggtcgcctatctggtggtggtgttcggtatcagcgtttatgcgatgcgtaaacggagcaccggcaccttccttaatgagtatttcctcggcagccgctctatgggcggtattgtgctggcgatgacgctcaccgcgacctatatcagtgccagtagctttatcggcgggccaggagctgcttataaatacgggctgggctgggtattgctggcgatgattcagcttcctgcagtctggcttagtctcggtattctcggcaagaagtttgcgattcttgcgcgccgctacaatgcagtgacgctgaacgatatgctgtttgcccgctaccagagtcgtcttctggtgtggctggcgagtttgagtttgctggttgcgttcgttggtgcgatgaccgtgcagtttatcggcggtgcgcgcctgctggaaaccgcggcgggtattccttatgaaaccgggctgctgatttttggtatcagcattgcgttatataccgcctttggtggctttcgcgccagcgtgctgaacgacaccatgcaagggcttgtgatgctgattggcaccgttgtgctgcttattggcgtagtacatgccgctggcggcttaagtaacgcagtacagaccttgcaaaccatcgatccgcaactggttacgccacaaggcgctgacgatattctgagccctgcctttatgacgagcttctgggtactggtgtgttttggcgtgattggcctgccgcatactgcggtgcgctgtatctcttataaagacagcaaagccgtacatcgggggatcatcatcggtacgattgtggtcgcaattctgatgttcggtatgcacctggccggagcgttaggtcgggcggtgatccccgatctcaccgtaccggacctggtgatcccaacgttaatggtaaaagtgctgccaccgtttgctgccgggatcttcctggctgcaccgatggctgcgatcatgagcacaattaacgcccaactgctgcaaagttccgctacgatcattaaagatctctatctgaatatccgtccggatcaaatgcaaaacgagacgcgtctgaagcggatgagcgcggtaattacgttagttctcggcgcgttgctgctgcttgccgcctggaagccgccagaaatgatcatctggctgaatttgttggccttcggtgggctggaagccgttttcctgtggccgctggtgctgggtctttactgggaacgcgccaacgccaaaggcgcgctaagtgcgatgatcgttggcggcgtgctgtatgccgtactcgcgacgctgaatattcagtacctgggcttccaccctatcgtgcccagcttactactaagtttgctggctttcctggtcggaaaccgtttcggtacatccgtcccgcaagctaccgttttgactactgataaataaagagttttgccatgccttggatccaactgaaactgaacaccaccggcgcgaacgcggaagatcttagcgatgcgctgatggaagcgggtgccgtttctatcacttttcaggatacccacgatacgccagtatttgaaccgctgccgggcgaaacgcgcctgtggggcgacaccgatgtgattggtctgttcgacgctgaaaccgatatgaacgacgtggtggcgattctggaaaaccatccgctgctcggcgcaggcttcgcgcataaaatcgaacaactagaagataaagactgggagcgcgaatggatggataatttccacccgatgcgctttggtgaacgactgtggatctgccctagctggcgtgatgtgccggacgaaaacgccgtcaacgtgatgttagatccagggctggcgtttggtacgggtacccatccaaccacctctctgtgcctgcaatggctcgacagcctcgatttaaccggtaaaacagtcatcgactttggctgtggttccggcattctggcgatcgcggcgctgaaactgggtgcagcaaaagccattggtattgatatcgatccgcaggcgattcaggccagccgcgataacgccgaacgtaatggcgtttctgaccgtctggaactctacttaccgaaagatcagccagaagaaatgaaagccgacgtggtggtcgctaacatccttgcaggcccattacgtgaactggcaccgttaatcagcgtcctgccggttagtggcggtttgctgggcctttccggtattctggcaagccaggcagagagcgtttgtgaagcttatgccgatagcttcgcactggacccggtcgtggaaaaagaagagtggtgccgtattaccggtcgtaagaattaaccttcgcatcgccgtagggtgacgcggggcgaagtgcgagcaagctcacaaaaggcacgtaaatttgccgattatttacgcaaatttgcgtgccaaaattttcattcataaagaaaaattgagaacttactcaaatttctttgagtgtaaattttagtcactattttctaatatgatgatttttatgagtaattatcgcaccacgctcattttaaatgcaattctttgatccatctcagaggattggtcaaagtttggcctttcatctcgtgcaaaaaatgcgtaatatacgccgccttgcagtcacagtatggtcatttcttaactcatgcgcatcggacaatatcagctcagaaatcgcctgatcgcagcgcccatggctggcattacagacagaccttttcggacgttgtgctacgagatgggagccggattgacagtatccgagatgatgtcttctaacccacaggtttgggaaagcgacaaatctcgtttacggatggtgcacattgatgaacccggtattcgcaccgtgcaaattgctggtagcgatccgaaagaaatggcagatgcagcacgtattaacgtggaaagcggtgcccagattattgatatcaatatgggttgcccggctaaaaaagtgaatcgcaagctcgcaggtagtgccctcttgcagtacccggatgtcgttaaaagcatccttaccgaggtcgtcaatgcagtggacgttcctgttaccctgaagattcgcaccggctgggcaccggaacaccgtaactgcgaagagattgcccaactggctgaagactgtggcattcaggctctgaccattcatggccgtacacgcgcctgtttgttcaatggagaagctgagtacgacagtattcgggcagttaagcagaaagtttccattccggttatcgcgaatggcgacattactgacccgcttaaagccagagctgtgctcgactatacaggggcggatgccctgatgataggccgcgcagctcagggaagaccctggatctttcgggaaatccagcattatctggacactggggagttgctgcccccgctgcctttggcagaggttaagcgcttgctttgcgcgcacgttcgggaactgcatgacttttatggtccggcaaaagggtaccgaattgcacgtaaacacgtttcctggtatctccaggaacacgctccaaatgaccagtttcggcgcacattcaacgccattgaggatgccagcgaacagctggaggcgttggaggcatacttcgaaaattttgcgtaaacagaaataaagagctgacagaactatgttcgaacaacgcgtaaattctgacgtactgaccgtttctaccgttaactctcaggatcaggtaacccaaaaacccctgcgtgacagcgttaaacaggcactgaagaactattttgctcaactgaatggtcaggatgtgaatgacctctatgagctggtactggctgaagtagaacagcccctgttggacatggtgatgcaatacacccgtggtaaccagacccgtgctgcgctgatgatgggcatcaaccgtggtacgctgcgtaaaaaattgaaaaaatacggcatgaactaattcaggttagctaaatgcttgattaaaaaggcgctactcggcatggggaagcgccttttttataggtgtcacaaagggagtgaccatgagaacaggatgtgaaccgacccggtttggtaatgaagctaagaccattattcacggtgatgcgcttgccgaacttaaaaagatccccgccgaaagtgtcgatctgatctttgccgacccaccatataacatcggtaaaaattttgatggtctgatcgaagcctggaaagaagatctgtttatcgactggctgtttgaagtgattgcagagtgccaccgcgttctgaaaaagcagggcagcatgtacatcatgaacagtacggaaaacatgccctttatcgatctccagtgccgcaagctttttaccatcaaaagtcgcatcgtctggagttatgacagttctggagtgcaggcgaaaaaacactacggctccatgtacgaacccatcctgatgatggtgaaagacgcaaagaactacacattcaacggtgatgctattctggtagaagccaaaaccggaagccagcgcgcgttgatcgattatcgcaaaaatcctccacagccttacaatcatcaaaaagtaccgggtaacgtttgggattttccgcgcgtgcgttatttgatggatgaatatgaaaaccacccgacgcaaaaaccggaagccttactgaaacgcattattctcgcctcttccaacccaggcgatatcgttctcgacccgtttgctggtagctttactaccggtgccgtagccatcgccagcggacgaaaattcattggtattgagatcaacagcgagtacatcaaaatggggcttcgacggctggatgtcgcgagccattactctgcggaagaactggcgaaagtgaaaaaaagaaagaccggcaacctgagtaaacgaagccggttaagcgaagttgaccccgatctcattacaaagtaaaggatgtgtaagcctggttttcagattattcatttcgtgtatatttcctgccagacttggttaaacatgcacaggctcaggtaatgattcgcaagtattggtggctcgtcgttttcgctgtcttcgtttttctgtttgatactttactgatgcagtggattgaactgctggcaacagaaacagacaaatgccgcaatatgaacagtgttaatccactaaaactggttaactgtgacgaactgaattttcaggacagaatgtgaatttacatgacacttaattcattcgtttgatgaattaatttcgttatgttttcatctggcatgaacattcttaatacgttatcgaccagagcgggggcttgtttataaagatcataacccgccatattcattaaccagttttgaacaattccgctgaaggcaccatcaataataatcatcacaacatctaaatcgaggttatttgctacacaaccttgttgctgacacgcctgcaatacttcgcggagagtctgcggattaaagcccatcttttcgcgtatcactccctcggccagcatctcatcattaaattcacatttgtgatataagattttcagcaacgcctgctggcggggaattttggcaatatattgcaagccgacaatcaatttttcacgcaattgttgaaacgggtcatgctctaatccagccgtcaagtgttcctggattaactcccgcaaactaggctgttgcaaccacatctcattaaacagttgagtcttgttttcgaagtgccagtagatagcgccacgcgtaacgttagcggcgtcggcaatgtcgttgagcgtcgtcttgcttacgccatgctgcgcaaactgggcgatggcagtttcaatcagttcttgccgggtcttcagagcttcggctttggttctttttgccatgattaattattcaggaaataaatatattcgacacagagtgagaaaatagcgaaggttaatctatcacctaatgtgtatttatacgagaggctaatattgagttgctataaatcgttaaataaataatatatattatttacctaagatacattcactacatcaatatatatttcaatttacgaggttttaattctgcctctttcaacccgcgtcaaaataaaacagtagaatattaatctttttttgtgtttatgtgccttgagatgcctgtattcataactattccttacatcgacgaatgataatttgtaggatagcgaactgtatttttctttctgcgagttaacgcgttgcctttttgggtaaataacgcgcttttggttttttgaggaatagtaatgacgaaacatgccaggtttttcctcctgccctcctttattctgatctccgcggctttaatcgccggttgtaacgataagggagaagagaaagctcacgtcggtgaaccgcaggttaccgttcatattgtaaaaacggccccgttagaagttaagactgaattaccaggccgcaccaatgcttatcgtatagccgaagttcgcccacaggttagcgggatcgtactgaatcgcaatttcactgaaggcagcgatgtgcaagcaggccagtccctgtaccagatcgatcccgcgacctatcaggcaaattatgacagcgcgaaaggcgaactggcgaaaagtgaagccgccgccgccatcgcgcatttgacggtaaaacgttacgttccgctcgtgggtacgaaatacatcagccagcaggagtacgaccaggccattgctgatgctcgtcaggccgatgccgccgtgattgccgcaaaagccacagtcgaaagcgctcgcatcaatcttgcttataccaaagtcactgcgccaattagcggacgtatcggcaaaagcactgtgaccgaaggcgctcttgtcactaatgggcaaacgactgaactggcgactgtccagcagctcgatcctatctacgttgatgtgacccaatccagcaacgattttatgaggctgaagcaatccgtagagcaaggaaatttgcataaggaaaacgccaccagcaacgtagagttggtcatggaaaacggtcaaacctatcccctgaaaggtacgctgcaattctccgatgtgaccgttgatgaaagcaccggctccataaccctacgtgctgtcttccctaacccgcaacatacgcttttgccgggtatgtttgtgcgtgcacggattgatgaaggcgtccaacctgacgccattcttatcccgcaacaaggcgttagccgcacaccgcgtggtgatgcaaccgtgctgattgttaacgataaaagtcaggttgaagcgcgccctgtcgttgccagtcaggcgattggcgataaatggttgattagtgaaggactgaaatctggcgatcaagtcattgtcagcggcctgcaaaaagcgcgtccgggagagcaggttaaagccactaccgatacccccgcagatactgcaagcaagtaaggtaatctgacatggcaaacttttttattcgacgaccgatatttgcatgggtgctggccattattctgatgatggcgggcgcactggcgatcctacaattgcccgtcgctcagtatccaacaattgcaccgcctgcggtttctgttagtgcaaactatccgggcgctgatgcgcagaccgtgcaggatacggtgacgcaggttatcgaacagaatatgaacggtatcgataacctgatgtatatgtcctccaccagcgattccgccggtagcgtgacaattacccttaccttccagtccgggaccgatcctgatatcgcgcaagtgcaggtgcagaacaaactccagctcgccacgccgttgctgccgcaggaggttcagcagcaggggatcagtgttgaaaagtccagtagcagctatttgatggtggcgggctttgtctctgataacccaggcaccacacaggacgatatcagcgactatgtggcctctaacgttaaagatacgcttagccgtctgaatggcgtcggtgacgtacagcttttcggcgcacagtatgcgatgcgtatctggctggatgccgatctgctaaacaaatataaactgacaccggttgatgtgattaaccagttgaaggtacagaacgatcagatcgctgccggacagttgggcggaacgccagcgttaccagggcaacaattgaacgccagcattattgctcagacgcggtttaaaaatccggaagaattcggcaaagtgaccctgcgcgtaaacagtgacggcagcgtggtacgcctgaaagatgtcgcacgggttgaacttggcggtgaaaactataacgttatcgctcgtatcaacggaaaaccggcggcgggcctggggattaagctggcaaccggcgcgaatgctctcgataccgcgaaagccattaaggcaaaactggcggaattacagccattcttcccgcagggaatgaaggttctctacccttatgacaccacgccattcgtccagctttctattcacgaagtggtaaaaacgctgttcgaagccattatgctggtgttcctggtgatgtatctgttcttgcagaatatgcgagcaacgctgatccccgccattgcggtacccgtggtgttgttagggacgtttgccatcctcgccgcttttggttactccatcaacacactaacgatgttcgggatggtgcttgccatcgggctgctcgtcgatgatgcgatagtggtggtggagaacgtcgagcgcgtgatgatggaggataagctcccgccaaaagaagcgacggaaaaaagcatgagccaaattcagggcgcactggtgggtatcgcgatggtgctgagtgcggtatttattccgatggcattcttcggcggttctactggggcaatttatcgccagttctctatcaccatcgttagcgcaatggcgctttctgttctggtggcattgattcttacccctgcgttatgtgcaacgctgcttaaacccgtctctgctgagcatcacgaaaataagggcggtttcttcggttggtttaataccaccttcgatcatagcgttaaccactacaccaacagcgtcggcaaaatcctcggatccacaggacgatatttactgatctatgcgctgattgttgcaggaatggtggtgttgtttttacgtcttccgtcttccttcttacctgaagaggatcagggtgtctttctgaccatgattcagttacccgctggcgcgacgcaagagcggacgcaaaaagtgttggatcaagttacggattactatctgaagaacgagaaagcgaacgttgaaagtgtctttacggttaacggctttagcttcagcggccaggcacaaaacgccggtatggccttcgtcagtctgaaaccgtgggaagagcgtaatggtgacgaaaacagtgcggaagcggtaatccatcgtgccaaaatggaattgggcaagatccgcgacggttttgtcattccattcaatatgccagccattgttgaactgggcacggcaacgggtttcgactttgagttaattgatcaggctgggctgggtcacgatgccctaacccaggcccgtaaccagttgcttggtatggcggcgcaacatcctgccagcttagtcagcgtgcgccctaatggcctggaagacaccgcgcagtttaaactggaagttgaccaggaaaaggcgcaggcattaggtgttagtctttctgacatcaatcagaccattagtacggcgctgggtgggacttacgttaacgacttcatcgaccgtggccgcgtgaaaaagttgtatgttcaggcggatgccaaattccgtatgctgccagaagatgtcgataaactttatgtccgcagcgccaacggcgaaatggtgccattcagcgcctttaccactagtcattgggtgtatggctctccgcgactggaacgctacaacggtctgccgagtatggagattcagggggaagccgcgccaggaaccagttccggcgatgccatggcgttgatggaaaaccttgcgagtaaattacctgcgggcattggttatgactggacgggtatgagctatcaggaacgcttaagcggaaaccaggctcccgctctggtagcaatttcctttgtggttgttttcctgtgccttgctgcactctatgaaagctggagtattcctgtcagcgttatgttggtagtgccgttagggattgtcggcgtgctgctggcggcgacactctttaatcaaaaaaatgacgtctactttatggtgggcttgctaacgacaattggcttgagcgccaaaaacgctattttgatcgttgagttcgctaaagatctcatggagaaagagggtaaaggtgttgttgaagcgacactgatggcagtacgtatgcgtctgcgtcctatcctgatgacctctctcgcctttattctcggcgtattaccgctagctatcagtaacggtgccggcagtggcgcgcagaacgctgtgggtatcggggtaatgggaggaatggtctctgcaacgttgctggcaatcttcttcgtaccggtgttctttgtggtgatccgccgttgctttaaaggataaatcagaaacataaaggcgctttcgggtgcctttattatttccagtgaaacccataaaaattaataagatattcttctgctcactctttaaaagctttctatagttcccgctcccttcactatttttacaattcacataatttgtcattattcattccgcaagatttataacctccggtgataaaatggcattcagctcgttaataagagagttaacttattaagcgttagcgtttattactgaggtaacaccatgaaaagattaattcctgtggcattgctcaccgcattgctggcgggctgtgctcacgatagcccctgcgttccggtttatgacgatcagggtcgtctggttcacaccaatacctgtatgaaaggcacgactcaggataactgggaaacggctggggctattgccggcggggcagctgctgttgctggcctgacgatggggatcatcgctctaagcaaataactgaacagggcgcggagttccgcgctctttttaacgatacagtatctctccataagataaaatattgctatattctgctgggtaattccctgctgatttagcatgttacatcgcgttatttcgctgctttcgaaataacgcatcaatttaattttcacacttcccaccagaaatatactcacgctaacaatcattattctgcttagtaaaacacgcgtaaatattttgcgccaaaatgtggcgcatgtttcattttcgcaccattgcggggcgctgtttttattatttcctgtctacactcagcttattgcgacgcgaaatcgtgcgcaaaagctggcactacttttgcttataagaggatggccacagacaggtaaaagacgtttcccaaacgtcctataacgataattttcgcctcacaggaagcattatgaaaaagatgatgatagccacactggctgccgccagcgtgctgcttgccgttgcaaatcaggcgctgctggcgcgacgcttgatgccgttcagaaaaaaggttttgtgcaatgcgggatcagtgatggattacctgggttctcttatgccgatgctgacggtaagtttagtggtattgatgttgatatttgtcgtggtgttgccgctgctgtatttggtgacgacacgaaagtgaaatataccccgctcactgcaaaagaacgcttcaccgctttacagagtggggaggtggatttgctctcccgtaatacgacctggactagttctcgcgatgccgggatgggaatggcatttaccggcgtcacttattacgacggcattggcttcctgacgcacgataaagcggggctaaaaagcgcgaaagaactggatggcgctaccgtctgtattcaggcgggtactgataccgaactcaacgtcgccgactacttcaaggcaaacaatatgaagtacacaccggtgactttcgatcgctctgacgaaagtgcgaaggcactggaatctggtcgctgcgatacgctggccagcgatcaaagtcaactgtatgccctgcgcatcaaattaagcaacccagctgaatggattgtcttaccggaagttatcagtaaagaaccgcttggtccggtagttcgtcgtggcgatgatgaatggttcagcattgtacgctggacgcttttcgccatgctgaatgctgaagagatgggcatcaattcccagaacgtcgatgaaaaagcggctaatccagcaacgcctgatatggcacatctgctgggtaaagaaggcgattacggcaaggatctgaagctggataataaatgggcctataacatcatcaaacaggtgggtaactacagcgaaatttttgagcgtaacgtaggtagtgaaagcccgctgaaaattaaacgtgggcaaaataatctctggaataacggcggtattcagtacgcaccgcccgtgcgttaagtcggtgtgaggtaacgagcgtcgctacggcggcgctctcttcagcgttatgctttccgaggtttctatgtctcatcgccgcagtaccgttaaaggcagtctctcttttgccaaccctacggttcgcgcctggttattccagatccttgccgttgttgctgttgtcggcattgttggttggttatttcacaacactgtaacgaatctcaataatcgtggcattactagtggttttgcctttctggatcgcggcgctggcttcggtattgtccagcatttgatcgattaccagcagggcgacacctacggacgcgtttttattgtcggcttactcaatacgctactggtttctgcattgtgtattgtgttcgcttctgttttgggcttctttatcggtctggcgagacttagcgataactggctgctacgaaagctttccacaatttatattgagatcttccgtaatattcccccgctgctgcaaatcttcttctggtactttgccgtgttgcgcaatttgcccggaccacgccaggctgtgagcgcgtttgatctggcctttttgagcaatcgtgggctttatattccgagtccgcagctgggagacggatttattgcgtttatcctggctgttgttatggctatagtcctttctgttgggctattccgctttaataaaacataccagataaagaccggacaactgcgccgcacctggccgatcgccgcagtgttgatcattggtttgcctttactggcgcaatggctttttggcgcagcactacactgggatgtcccagccctacgaggctttaacttccgcggcgggatggttttaattcctgaactggcagccttaacgctggcacttagcgtttatacatctgcatttatcgccgagattatccgcgctgggatccaggcagtgccttatggtcaacatgaagcggctcggagtctgggattacccaacccggttacgctacgccaggtcattattccccaggcattgcgggtgattattccaccgttaaccagccagtatctcaacatcgtcaaaaactcctctcttgccgccgctattggctatcccgatatggttagcctgtttgccggcaccgtgctgaatcagacggggcaagccatcgagacgatagccatgaccatgagcgtctatctgattatcagcctgactatcagcctgctgatgaatatctataaccgccgcatcgcgatcgttgaacgctaaggagtcatgatgacaaaagtattgctgtctcatcccccgcgcccggcgagccataacagtagccgcgcgatggtgtgggtgcgaaaaaatctgttctccagctggagcaatagcctgctgactattggctgcatatggttgatgtgggaactgatcccaccgttgctgaactgggcatttttgcaggctaactgggttggcagtacgcgtgccgactgcacaaaagccggtgcctgttgggtcttcatccacgaacgatttggtcagtttatgtatgggctttacccacacgaccaacgctggcgaattaacctcgcattactgattgggcttgtgagcatcgcaccaatgttctggaaaatactcccgcatcgcggtcgctatattgcggcctgggcggtgatttacccactgattgtctggtggctgatgtatggcggtttttttgctcttgagcgggttgaaacccggcaatggggcgggctgacgctaactttaattattgcaagtgttgggattgcgggggcgctaccgtgggggatcttactggcgttaggtcgccgctcccatatgccgattgtgcgtatcttaagcgtcatttttatcgaattctggcgcggcgtgccgctgattaccgttctgtttatgtctagcgtcatgctgccgttgtttatggcagaaggcaccagtatcgacaaattgatccgcgcgctggttggcgtgatcctgtttcagagtgcatatgttgcggaagtcgtgcgaggtggattacaggcgctgcctaaagggcaatatgaagcggcagagagcctggcgttgggttactggaaaactcaggggctggttattctgccacaggcgttgaagctggtaattcctgggctggtaaataccatcatcgcactcttcaaagataccagcctggtgatcattatcgggttgttcgatcttttcagtagcgttcagcaggcaaccgttgatcccgcctggttgggtatgagcacggaagggtatgttttcgccgcgctgatctactggatcttctgtttcagcatgagccgctatagccagtatctggaaaaacgttttaacaccgggcgtacaccgcattgaggacactatgagccaaattttactgcaacctgctaacgcgatgattacgctggaaaacgtcaataaatggtatggacaattccatgttttgaaaaatataaatttaaccgtgcaaccgggagaacggatcgttctgtgtggccctagtggttccggtaaaagcacaaccattcgttgtattaatcatctggaagaacatcaacagggacggatcgtggtagatggcatcgaacttaatgaagatatccgcaatattgagcgcgtcaggcaggaagtgggaatggtctttcagcatttcaatctcttccctcatctgaccgttttacagaactgtaccctggcaccgatttgggtacgcaagatgcctaagaaagaggctgaagatctggcggtgcattacctagagcgggtgagaattgccgaacatgcgcataagtttcccggacagattagtggtggtcagcagcaacgcgttgccattgcgcgtagcctgtgtatgaagccgaaaattatgttgtttgatgagccaacgagcgcgctcgatcctgagatggtgaaagaggtgctggatacgatgattgggctggcgcagagcggtatgacaatgttgtgtgtaacacatgagatggggtttgcacgaaccgtcgctgaccgggtaatttttatggatcgtggggaaatagtggagcaagctgcacctgatgaattttttgcgcatcctaaaagtgagcgtacgagggcatttttaagccaggtaatccattaattgaatgttagttcgaaaagcaaaaaggccatcctttcggatggcctttcgcttgatttgatgtctggcagtttatggcgggcgtcctgcccgccaccctccgggccgttgcttcgcaacgttcaaatccgctcccggcggatttgtcctactcgggagagtgttcaccgacaaacaacagataaaacaaaaggcccagtcttccgactgagccttttgttttatttgatgtctggcagttccctactctcgcatggggagaccccacactaccatcggcgctacggcgtttcacttctgagttcggcatggggtcaggtgggaccaccgcgctactgccgccagacaaattcttttctaatctgccgaactttaacctaaaaagtggtgctgatacccagagtcgaactggggacctcacccttaccaagggtgcgctctaccaactgagccatatcagcacgctaaatttgatgcctggcagttccctactctcgcatggggagaccccacactaccatcggcgctacggcgtttcacttctgagttcggcatggggtcaggtgggaccaccgcgctacggccgccaggcaaattctgttttatcagaccgcttctgcgttctgatttaatctgtatcaggctgaaaatcttctctcatccgccaaaacagcttcggcgttgtaaggttaagcctcacggttcattagtaccggttagctcaacgcatcgctgcgcttacacacccggcctatcaacgtcgtcgtcttcaacgttccttcaggacccttaaagggtcagggagaactcatctcggggcaagtttcgtgcttagatgctttcagcacttatctcttccgcatttagctaccgggcagtgccattggcatgacaacccgaacaccagtgatgcgtccactccggtcctctcgtactaggagcagcccccctcagttctccagcgcccacggcagatagggaccgaactgtctcacgacgttctaaacccagctcgcgtaccactttaaatggcgaacagccatacccttgggacctacttcagccccaggatgtgatgagccgacatcgaggtgccaaacaccgccgtcgatatgaactcttgggcggtatcagcctgttatccccggagtaccttttatccgttgagcgatggcccttccattcagaaccaccggatcactatgacctgctttcgcacctgctcgcgccgtcacgctcgcagtcaagctggcttatgccattgcactaacctcctgatgtccgaccaggattagccaaccttcgtgctcctccgttactctttaggaggagaccgccccagtcaaactacccaccagacactgtccgcaacccggattacgggtcaacgttagaacatcaaacattaaagggtggtatttcaaggtcggctccatgcagactggcgtccacacttcaaagcctcccacctatcctacacatcaaggctcaatgttcagtgtcaagctatagtaaaggttcacggggtctttccgtcttgccgcgggtacactgcatcttcacagcgagttcaatttcactgagtctcgggtggagacagcctggccatcattacgccattcgtgcaggtcggaacttacccgacaaggaatttcgctaccttaggaccgttatagttacggccgccgtttaccggggcttcgatcaagagcttcgcttgcgctaaccccatcaattaaccttccggcaccgggcaggcgtcacaccgtatacgtccactttcgtgtttgcacagtgctgtgtttttaataaacagttgcagccagctggtatcttcgactgatttcagctccacgagcaagtcgcttcacctacatatcagcgtgccttctcccgaagttacggcaccattttgcctagttccttcacccgagttctctcaagcgccttggtattctctacctgaccacctgtgtcggtttggggtacgatttgatgttacctgatgcttagaggcttttcctggaagcagggcatttgttgcttcagcaccgtagtgcctcgtcatcacgcctcagccttgattttccggatttgcctggaaaaccagcctacacgcttaaaccgggacaaccgtcgcccggccaacatagccttctccgtccccccttcgcagtaacaccaagtacaggaatattaacctgtttcccatcgactacgcctttcggcctcgccttaggggtcgactcaccctgccccgattaacgttggacaggaacccttggtcttccggcgagcgggcttttcacccgctttatcgttacttatgtcagcattcgcacttctgatacctccagcatgcctcacagcacaccttcgcaggcttacagaacgctcccctacccaacaacgcataagcgtcgctgccgcagcttcggtgcatggtttagccccgttacatcttccgcgcaggccgactcgaccagtgagctattacgctttctttaaatgatggctgcttctaagccaacatcctggctgtctgggccttcccacatcgtttcccacttaaccatgactttgggaccttagctggcggtctgggttgtttccctcttcacgacggacgttagcacccgccgtgtgtctcccgtgataacattctccggtattcgcagtttgcatcgggttggtaagtcgggatgacccccttgccgaaacagtgctctacccccggagatgaattcacgaggcgctacctaaatagctttcggggagaaccagctatctcccggtttgattggcctttcacccccagccacaagtcatccgctaatttttcaacattagtcggttcggtcctccagttagtgttacccaaccttcaacctgcccatggctagatcaccgggtttcgggtctataccctgcaacttaacgcccagttaagactcggtttcccttcggctcccctattcggttaaccttgctacagaatataagtcgctgacccattatacaaaaggtacgcagtcacacgcctaagcgtgctcccactgcttgtacgtacacggtttcaggttctttttcactcccctcgccggggttcttttcgcctttccctcacggtactggttcactatcggtcagtcaggagtatttagccttggaggatggtccccccatattcagacaggataccacgtgtcccgccctactcatcgagctcacagcatgtgcatttttgtgtacggggctgtcaccctgtatcgcgcgcctttccagacgcttccactaacacacacactgattcaggctctgggctgctccccgttcgctcgccgctactgggggaatctcggttgatttcttttcctcggggtacttagatgtttcagttcccccggttcgcctcattaacctatggattcagttaatgatagtgtgtcgaaacacactgggtttccccattcggaaatcgccggttataacggttcatatcaccttaccgacgcttatcgcagattagcacgtccttcatcgcctctgactgccagggcatccaccgtgtacgcttagtcgcttaacctcacaacccgaagatgtttcacttcagagttgcgaaaatttgagagactcacgaacaactttcgttgttcagtgtttcaattttcagcttgatccagatttttaaagagcaaaacttcgcagtgaacctttgcaggtacactctgaagtattttttatttaatcactacagagatggtggagctatgcgggatcgaaccgcagacctcctgcgtgcaaagcaggcgctctcccagctgagctatagccccataacatgtagttaaaacctcttcaaatttgccgtgcaaatttggtaggcctgagtggacttgaaccaccgacctcacccttatcaggggtgcgctctaaccacctgagctacaagcctgtagaggttttactgctcattttcatcagacaatctgtgtgagcactgcaaagtacgcttctttaaggtaaggaggtgatccaaccgcaggttcccctacggttaccttgttacgacttcaccccagtcatgaatcacaaagtggtaagcgccctcccgaaggttaagctacctacttcttttgcaacccactcccatggtgtgacgggcggtgtgtacaaggcccgggaacgtattcaccgtggcattctgatccacgattactagcgattccgacttcatggagtcgagttgcagactccaatccggactacgacgcactttatgaggtccgcttgctctcgcgaggtcgcttctctttgtatgcgccattgtagcacgtgtgtagccctggtcgtaagggccatgatgacttgacgtcatccccaccttcctccagtttatcactggcagtctcctttgagttcccggccggaccgctggcaacaaaggataagggttgcgctcgttgcgggacttaacccaacatttcacaacacgagctgacgacagccatgcagcacctgtctcacggttcccgaaggcacattctcatctctgaaaacttccgtggatgtcaagaccaggtaaggttcttcgcgttgcatcgaattaaaccacatgctccaccgcttgtgcgggcccccgtcaattcatttgagttttaaccttgcggccgtactccccaggcggtcgacttaacgcgttagctccggaagccacgcctcaagggcacaacctccaagtcgacatcgtttacggcgtggactaccagggtatctaatcctgtttgctccccacgctttcgcacctgagcgtcagtcttcgtccagggggccgccttcgccaccggtattcctccagatctctacgcatttcaccgctacacctggaattctacccccctctacgagactcaagcttgccagtatcagatgcagttcccaggttgagcccggggatttcacatctgacttaacaaaccgcctgcgtgcgctttacgcccagtaattccgattaacgcttgcaccctccgtattaccgcggctgctggcacggagttagccggtgcttcttctgcgggtaacgtcaatgagcaaaggtattaactttactcccttcctccccgctgaaagtactttacaacccgaaggccttcttcatacacgcggcatggctgcatcaggcttgcgcccattgtgcaatattccccactgctgcctcccgtaggagtctggaccgtgtctcagttccagtgtggctggtcatcctctcagaccagctagggatcgtcgccttggtgagccgttaccccaccaacaagctaatcccatctgggcacatccgatgacaagaggcccgagggtccccctctttggtcttgcgacgttatgcggtattagctaccgtttccagtagttatccccctccatcaggcagtttcccagacattactcacccgtccgccactcgtcagcgaaacagcaagctgtttcctgttaccgttcgacttgcatgtgttaggcctgccgccagcgttcaatctgagccatgatcaaactcttcaatttaaaagtttgatgctcaaagaattaaacttcgtaatgaattacgtgttcactcttgagacttggtattcatttttcgtcttgcgacgttaagaatccgtatcttcgagtgcccacacagattgtctgataaattgttaaagagcagttgcgacgcggctttcagctcactgtcgcgaggtggcgtatattacgctttcctctttcagagtcaaccctgaatttcaggatttttttctcttcgttgttccgaccatcctgtgaagtgtttcacgttgtcgtctcaacggaggcgcattatagggatcccaattttttgcacaagtatttttttgatctttttttctgtttgttgttttttcaccctttttgctgcaatcgcacacaaaacggtgcttttttgcatactaaaagacttgcacaaggccaataatgcccccaaagtcattagtaaatcatttattgctgaggtaagtatgtctgatgttttacgcccataccgcgatctttttccacaaatcggtcagcgcgtaatgatcgacgatagcagtgtcgtgattggtgacgttcgtctggctgatgatgtggggatctggccgctcgttgtgattcgtggagatgtacattatgtacagatcggagcacgcaccaatatccaggatggcagtatgttgcatgtcactcataaatccagctacaacccagatggcaacccattaaccattggcgaagatgtcactgttggtcacaaggtgatgctccacggctgcaccattggcaatcgagttttggttgggatgggcagtattttacttgatggcgcaatagtagaagatgatgtgatgattggtgcgggtagtctggtcccacaaaataaacggctggagagcggatatctgtatctcggtagccccgtcaaacagatccgcccgttaagtgatgaagagaaggctgggttacgctattccgcgaataattacgtgaaatggaaggacgaatatctggatcagggtaaccagacccagccttgatcatcttcactttgttcctgaattaagttttccgcttcttcttccaggtcccagcgatgctgacgaaaactcgctaaccactgttctggcgtatctccagtaaagcgatacgccagactctcgccagagatcgcgcatgtcagttgcataccattcacgagagcgggaaaacatacacattttttattctcgtcccactcttccctgtccggaaactggatggcctgattcacgcggacaattcctcctgcaattgctttataactggttctacgtcaggcagaacaccgtgccagagaagaaaggcatgagccgcctgtgccaccagcattcctaaaccatcagcattacgcttactgcctcgctgctcacaccatgccagaaaaggagtttttcctttctgatagaacatgtcatagcaataaatgcctggatgaatgaggctactcgggatcgccggaatatcaccactgatgccactggatgttgcattaataatgagatcaaactcatgaccttccagttcgtccatactcaacgcctgaatactgccagtgtgcgcaaacaatttagccaactcttccgcgcgggataccgtccgattagttattgtcaccgcacagtccagggaaaggagtggcagtagtacgccgcgagatgctccaccagcgccgataagcagaatacgtaaaccagggcggataaaagacagacgttccagatcgcttaacaagcctacaccatcggtattgtcacccagcaggcgtccatcttctaaccgcatgagggtattaacagcaccagccaacgctgcccgttcagtaagctcatccgctctggcaaaagcctcttctttaaaaggcaccgtcacattcgcacctttaccaccagcactaaagaaagcgttcagtgtgttgatgaaatcattgatgggtgccaacacgcgcccatagggatgttcaatattcagttgctgagcaaattgctgatgaatgaatgggcttttgctgtgggctatcggattaccaaaaacagcataggtttccattatgttacccctgtcgaaacagttcacccgtcagggcatcgcggatttcactaggatttaaacgcccccccgtttcaccaggcacaaccgggaacgccgcgccaaattgtgcgcgaacttcgtctactgttcgacaaggtggcaatccactcaagttggcactggtagaaaccagcggtttaccataagcctggcacaaagcaaccaccaacggatggtcggtgactcgtacagcaaggctatcaaagcggcccgtcaaccagcgcggtgttgtcgcaggcgcgggaaagacaaaggtgacaggacctggccagcgggaaaaaatggtttcacgctgcacgtcagtcaacatggtgtcatcaatatagggtttaagctgctcgtaatttgctgcgattaaaatcagccccttatcaaccggacgctgttttaactccaacagtcgcatcactgctgtttcgctatcaggatcgcacccaacaccgaaaacggcttccgttggataggcgatgacacgttcttcattgagaacatctatcgcagctgcgatagcgtctctttgcaggttattattcacgttattattccgcgctaaccggctttccacattgtttactggcacaaaagtgttttacaccctgcgcggttttcttttcgatgagtagcggataatgacactcagggcattctccagctatgggtttgaagttaatggcaaattgacactccgggtagcgatcacaagagtgaaatgttttgccataacgggagcggcgctggaccagatggcccgtccgacattgggggcatgtaattgctgtttcgtccggtttatcgataagttcggtatgttcgcattcagggtagttaatgcaaccaataaacataccaaagcgtccctggcgtaataccagatttgcgccacatgcagggcaaacctgcccctccagaactttgacgatatgtccatccgcactagatttcagaggacggacgtagtcacacgccggatactgactgcatccaagaaacggaccgtgtttcccggatcgaataaccagttcagccccgcactttgggcaggactcattattacgcaccgtgaacagtgcacttttcgccataacaacttatgctgaattaaagaaatgattaatgcagcataccttcattcacttcaaagagtaattcttccatttgctggtacgcattttcgcagcccggaatattgaacaacaccatcaggatcacccatttcagatcatccagttcgaactctgcgttatccagcgcgagcactcgctctatcaccatttcacgagtttcaaggttgagcacctgaatctgctcaaggaaaagcagaaacccacggcagctggcatccagtcgttcacactcttccggtgtataaatacgcatggagagaggatcgctggccagttgcatcggttctgccaacccttcctgataatcagcaagtttttccagccatagcagggcattgtagatatcttctcgctcaaaacctgcgtcggtaagatcctgttcaagtttgtcttgatccacacgcaactcagcttctgtgtgaatataggtttcaaacaaatacattagtacgtcgaacatggcatgccctcctcaatcggacatagccgccgggtacagctgcgatccatcctgctaactccagttcgagtagttgagtaactacctctggcacaggttggccggcacgttcagcgacgacgtcaacaggtgttacctcatctcctacgttagccaggagctcaggaaatggcaatgccacgtcttgctgatctggactataaaaactattttcaggggcgtctggcaaccagtgcaatccaaattgcaagttttccagaatttcttccggttccgtcacaagaatcgcaccttgttttattaaccagtgaggcccttcgcttcccggattccctattggacctggcaaggcaaaaacttctcgcccctgctcaagcgcacaacgtgctgtcaccaggctaccactacgcaaagccgcttccaccaccagtacacctttacttagaccactgataatgcgatttcttcgtgggaaattgtaagcaaggggtggaacatcgaggggaaattcgctgacgagagcgcccccctgttcaagcagactggcagccagtcgggcatgacggcggggatgaatggtattaagtccattccccaatacagcaatgctgacgccatttacctgtaaggctgctttatgcgctacaccatcgattccacgcgccagtccactcgtaattgtcactccacgcgtcgccagagtttcgcaaaataatcgtccccatcgctcgccataccaactatgcgcccgactccccactacggcaagctgaaaactatgcagcgcgtgcagttctccttcaacaaacagtgcgccggggtaatctgtcgtcgccagaagttgaggaggataaaattcgctgtccgcaggaattaaatgatggttgggttgctccaaccaacaaagactgctttcgatactctttcgtggaaaactaagaaagcgttgtgcctgccgcaatgtaagccctgtttgctgcaatacaaccgcatcaatatggctctgttttgccacccagtgagcgatacggaccatatcatcgccgtacaagctgctgatactcattaaacgcagccaaatttctgtatcgaccatccttatctccctgccataagcagccttagcaatctttgcgattggtcagtgatgctgtcaatcagagggggatttgtctagaatagaagaaataatctttctaactcctgaacacatctctggagatttatgagcgttttgcaagtgttacatattccggacgagcggcttcgcaaagttgctaaaccggtagaagaagtgaatgcagaaattcagcgtatcgtcgatgatatgttcgagacgatgtacgcagaagaaggtattggcctggcggcaacccaggttgatatccatcaacgtatcattgttattgatgttagcgaaaaccgtgacgaacggctagtgttaatcaatccagagcttttagaaaaaagcggcgaaacaggcattgaagaaggttgcctgagcatccctgaacaacgtgctttagtgccgcgcgcagagaaagttaaaattcgcgcccttgaccgcgacggtaaaccatttgaactggaagcagacggtctgttagccatctgtattcagcatgagatggatcacctggtcggcaaactgtttatggattatctgagtccgctgaaacaacaacgtattcgtcagaaagttgaaaaactggatcgtctgaaagcccgggcttaaggataagaactaacgtgagtgaaagtctacgtattatttttgcgggtacacctgactttgcagcgcgtcatctcgacgcgctgttgtcttctggtcataacgtcgttggcgtgttcacccagccagaccgaccggcaggacgcggtaaaaaactgatgcccagcccggttaaagttctggctgaggaaaaaggtctgcccgtttttcaacctgtttccctgcgtccacaagaaaaccagcaactggtcgccgaactgcaggctgatgttatggtcgtcgtcgcctatggtttaattctgccgaaagcagtgctggagatgccgcgtcttggctgtatcaacgttcatggtagtctgctgccacgctggcgcggtgctgcaccaatccaacgcagtctatgggcgggtgatgcagaaactggtgtgaccattatgcaaatggatgtcggtttagacaccggtgatatgctctataagctctcctgcccgattactgcagaagataccagtggtacgctgtacgacaagctggcagagcttggcccacaagggcttatcaccacgttgaaacaactggcagacggcacggcgaaaccagaagttcaggacgaaactcttgtcacttacgccgagaagttgagtaaagaagaagcgcgtattgactggagtcttagcgcagcacagcttgaacgctgcattcgcgctttcaatccatggccaatgagctggctggaaattgaaggacagccggttaaagtctggaaagcaagcgtcattgatacggcaaccaacgctgcaccaggaacgatccttgaagccaacaaacaaggcattcaggttgcgactggtgatggcatcctgaacctgctcagcttacaacctgcgggtaagaaagcgatgagcgcgcaagacctcctgaactctcgtcgggaatggtttgttccgggcaaccgtctggtctgatagtccactcttctaagcccggtcttgccgggcgtttttatacttatgaaaaaacaacgtaatttacgtagcatggcggcccaggccgttgaacaagtcgtcgagcaagggcaaagtttaagcaacattctgccaccgctccagcaaaaagtttccgataaagacaaagcacttcttcaagagttgtgctttggcgtactgcgtacgcttagccagttagactggctgattaataagttaatggcccgtccgatgaccggcaaacagcggaccgtgcattacctgattatggttggtttgtatcaactgctttatacccgcattccacctcatgctgcgctggctgaaacggttgaaggcgctatcgcaattaagcgtccgcaacttaaagggttgataaacggtgtattacgccagttccagcgtcagcaagaagagttattagccgagtttaatgccagtgatgcacgttatctgcatccttcctggttgctgaagcgtctgcaaaaagcgtatccagagcagtggcaatccatcgtcgaagccaataaccagcgtccgccaatgtggctgcgtattaatcgtacgcatcattcccgcgacagctggcttgcattgctggatgaagcaggaatgaaaggtttcccgcatgcggattaccctgatgctgtacgtctggaaacacctgcacctgttcatgcgctacctggttttgaagacggatgggttaccgttcaggatgcaagtgcacaaggttgcatgacctggcttgcgccacaaaacggtgaacacattttggatctttgtgccgcccccggcggtaaaacaacgcatatccttgaggtggcaccagaagcgcaggttgttgcggttgatatcgacgaacagcgcctctctcgggtttacgacaatttaaaacgccttggtatgaaggcgaccgtgaaacaaggtgatggccgttacccttctcaatggtgtggcgagcaacagtttgatcgcattttattagatgcgccttgtagtgcaaccggtgtgattcgtcgccatccagatattaaatggttacgtcgcgatcgcgatatcccggaactcgcgcaattgcagtctgaaattctcgacgccatttggccgcatttaaaaaccggtggaactctggtctatgccacctgtagcgtgttaccggaagagaatagcctgcagattaaagcctttttgcaacgtaccgctgatgccgaactttgcgaaacaggaacaccagagcaaccgggtaaacaaaatctacctggtgccgaagagggcgacggcttcttttacgctaagctaatcaaaaagtgatgagataacgggtcgcgactgatgaaaattatcattctgggtgccggccaggttggcggcacactggcggaaaacctggttggcgagaacaacgatattactgttgtcgataccaacggtgagcgtctgcggaccttacaggataaatttgacctgcgggtcgtgcaggggcatggctctcatccacgcgtattgcgggaggcaggtgccgacgacgccgatatgctggttgctgtaaccagtagtgatgaaaccaatatggttgcctgccaggtagcctacagtcttttcaacacccctaatcgcatcgctcgtatccgcagtccagactacgtgcgcgatgccgataagctatttcatagtgatgctgtgccgattgatcatctgatcgcaccagagcagttggttatcgataatatttaccgactgattgagtatcccggcgcattgcaggtggtgaacttcgctgagggtaaagtcagcctggctgtggttaaagcctattatggcggcccgctgattggtaatgcacttagcaccatgcgcgaacatatgccacatatcgatactcgtgtggcagcaattttccgccacgatcgccccattcgtccgcaaggtagcaccattgttgaagctggtgatgaagtgttctttattgccgctagtcagcatatccgcgcggtgatgagtgaattacagcgactggaaaaaccgtataagcggatcatgctggttggtggcggtaatatcggtgcagggctggcgcgtcgtctggaaaaagattacagcgttaaactcatcgaacgtaatcagcagcgcgctgccgaactggcggaaaagttacagaatacgatcgtcttttttggtgatgcgagcgatcaagaactactggccgaagaacatatcgatcaagttgatctgtttattgccgtcaccaacgatgacgaggccaatatcatgtccgccatgcttgccaaacgtatgggtgcgaaaaaggtgatggtattgatccagcgtcgcgcttatgtggatctggttcaggggagcgttatcgatattgcgattagtccacaacaagcaactatttctgcgttgcttagccatgtgcgaaaagcagatattgttggtgtttccagtttgcgccgcggcgtagcagaagctattgaagccgttgctcacggtgatgaaagcaccagtcgcgttgtcggcagagtcattgacgaaatcaagctaccgccaggaacgattattggagcggtggtacgtggaaacgacgtgatgattgccaatgacaatctgcgcattgagcaaggcgatcacgtaattatgttcctcacagataaaaagtttattaccgacgtcgaaagactcttccagccaagccctttcttcttgtaattaataaggcgtctaatgacgccttattatttccctttgattatcaaggattaattaaattcattcctggcaggaaaatggcttaacatttgttagacttatggttgtcggcttcatagggagaataacatgagcattattaaagaatttcgcgaatttgcgatgcgcgggaacgtggtggatttggcggtgggtgtcattatcggtgcggcattcgggaagattgtctctagtctggttgccgatatcatcatgcctcctctgggcttattaattggcgggatcgattttaaacagtttgctgtcacgctacgcgatgcgcagggggatatccctgctgttgtgatgcattacggtgtcttcattcaaaacgtctttgattttctgattgtggcctttgccatctttatggcgattaagctaatcaacaaactgaatcggaaaaaagaagaaccagcagccgcacctgcaccaactaaagaagaagtattactgacagaaattcgtgatttgctgaaagagcagaataaccgctcttaacaagcgccactaagcagaagaccagtggtaaaaaagtgatttactttcttgccactggcctcccagttcccccgattgccatgttttccttttcgcatgtaactgcctttccccttcttatttttctctacgcgctgtcggaataagggatcatgtagtaatgcttctatcgcattatcctttatctgccctttagtatgctgatatcgactcataaaaactccagttggttatttaacggcgcgagtgtaatcctgccagtgcaaaaaatcaacaaccactcttaacgccactcgccccttgttcaagagcttcaagaatgctacaataaacactgctatgagcagtcccacaacaggcatcgttaaggcgttgcaaggaacgctgcatactctgcaactcggctatccgtgcttcgacttcctgcaatctttcctgcacaatgcctttactctcctgacaggtatggtgttcaggatcgatgcggatgctcagcaactcgcggatgctctccagactgaaacctagttgtctggcatggcggataaatttcaatcgctggagatcgctttcggtatataggcgaaacccaccttcagtacgcacttcatgctccatcatctgctgtttttcgtaataacgaatcgtgtcgggtgttacttccgccatttttgccagctcaccaatgcgatacatacatactccattagttatcgttgattttgtccaacaacttgtcagcataatcgccgcgtaaaaaatcggtactcaatccagcttgtcgcagcttcaattccagtaaactcaatcgacggctaacctcttgatattgcggatcatcgtgacggatacctttgagaatatccagaagctgaattgcttctctccgttgctcaagttctggcggtaagcaaccggcattcttcagcaagcgataccccgcacgtaattccggtggcacgtgagaatcatcatccagtatcaatggttcgccgctacctgccaggttatcaaactcacctttcgcttgcgcttctgctatatggcgctctgcccactggtcaagtaaccacataaatactccaggggatgaacaaaaagagtacagctattgtagataagtggggatactacgggtataaaaaaacccgccggggcgggtttttttacgttgcttcagattactctgcagcagcttctgctttctcactacgatcaaccagctcgatgtaagccatcggcgcgttgtcgcctgcacggaagccacacttcagaatacgagtgtaaccaccggcacggctcgcgaaacgcgggcccagttcgttaaacagttttgccacgatctcgttatcacgagtacgggtgaatgccagacgacgattagcaacgctatcagtcttggcaagagtaatcagcggctcaactacgcggcgcagctctttcgctttaggcagagtcgtcttgatgatttcatgacgaaccagactacctgccatattgcggaacatagcctggcgatggctgctgttgcggttcagttgacgaccactcttacgatggcgcatgaccttatccttctcagtaaaaccttaacctgtgattcggttactcgtcagcgatgcttgccggtggccagttttccaggcgcatgcccagagacagtccacgggaagccagcacgtctttaatctcagtaagagattttttaccaaggttaggcgttttaaggagctcaacctcggtacgctgtaccagatcaccgatatagtggatagcttctgctttaaggcagttagcagagcggacagtcaattccagatcgtcaacagggcgcagcaggatcggatcgaactctggtttctcttctttcacttcaggctgacgtacatcacgtaagtcaacgaaagcttccagttgttcagccagaatggttgccgcacgacgaatcgcctcttcaggatcgattgtgccgttggtttccatttcgatgaccagcttgtccaggtcggtacgctgttctacacgcgctgcttcaacattgtaggcaatacgctccacagggctgtagcatgcgtcgaccagcagacggccgattgggcgctcatcttcttcgctatgaattcgggtagaagccggcacataaccacgaccgcgctgaactttgatacgcatgctaatagacgcgttctcatcggtcaggtggcagatcacgtgctgcggcttgacgatttcgacatcaccgtcgtgggtgatatcggctgcagtcacagggccaatgccagatttattcaaggtaagaataacttcatctttgccctgaactctcaccgccagccctttcaggttgagcaggatttccaggatatcttcctgaacgccttctttggtgctgtactcatgtagtacaccatcaatctcaacctcggtcaccgcgcaacccggcatgctactgagcagaatacggcgcagtgcgttacccagagtatggccaaagccacgctctaaaggctcaagggtcaccttggcgtgcgtgctactcacttgctcgatatcaaccaggcgcggttttagaaactctgtcacagaaccctgcattgtgtcctctctttggtactaagctttacttggagtaaagctcgacgatcaggtgttcgttaatgtccgcagacagatcagaacgctccggcttacgcttaaacgtaccttccatcttgccagcatcaacttccagccaggttggcttttcacgctgctcagccagctccagagcggctttcacgcgagactgcttcttcgctttctcacgaatgcttacaacgtcattcggactaacctgataagaagcgatgttaacaacacgaccgtttaccataattgctttatggctaaccagctgacgtgcttctgcacgagtggcaccgaagcccatacggtatacaacgttgtccagacgaccttccagcagagccaacaggttttcaccggtgttgcctttcagacgtgctgcttctttgtagtagttacggaactgacgctccagcacaccatagatacggcgaactttttgcttttcacgcaactgcacaccatagtcagacagacgcggtttacgcgcaccgtgctggccaggagcttgttcaattttacacttggtatcgatcgcgcgaacgccagacttaaggaataagtcggtgccctcacgacggctcagcttgagcttaggacccaaatatcttgccattttctttctccaacaaacctggaaaacgaggcgttatacgcgacgttttttcggcggacgacaaccgttatgagggatcggagtcacatcagtaatgttagtgatgcggaaacctgcggcgttcagagcacgaatagtagattcgcggcctggacccggacctttaaccataacttccagattcttgatgccgtattctttcacggcgtcagcgcaacgctctgctgcaacctgagctgcaaacggagtggatttgcgagaaccacggaaaccggaaccaccggctgttgcccaacccaacgcgttaccctgacgatcagtgatagtcacgatggtgttgttgaaagaagcatggatatgagccacgccgtcagagacttgttttcttacacgtttacgtgcacgaattggtgcctttgccattattcaatcaccccgattatttcttgatcggtttgcgcggacccttacgggtacgtgcgttggtcttggtacgctgaccgcgaaccgggagaccacgacgatgacgcaaaccgcgatagcaaccaagatccatcaggcgcttgatgctcatgctgatttcacggcgcagatcaccttcaacgacaaatttggcaacttcgtcacgcagcgtgtcgatttgtccttcagacagctcactgatcttaacatcttcagcgatacccgctgcagccaggatggctttagaacgggtcttgccgacgccataaatgctagttaatgcgattacggcatgcttatgatcaggaatgttaatgcctgctatacgggccactatgcactcctactatttaatatgtacgttccatgctgaaaagcccgttttcaggatactcaaatggaaacgcacagacatacaaaagattggctggctaatctagccagctcaacccaactttgcaagaaaaatatgcgaaaaaatcagccttggcgctgtttatgcttcggctcggcactgcaaatcacacggatgacaccatcacgcttaacgattttgcagttacggcataatttcttgacggaagcacgaactttcatttttactctccgtaacttctcgggcgaccaattatcggccgtagcctttcaggttcgccttcttcaatgcagactcatactgactggacatcatcagagtttgcacttgagccataaagtccataatcacgacaacaacgataagcagactggtcccaccgaagtagaacggtactttcattgcatcacgcatgaactccgggatcaggcagataaaggtaatatacagcgcaccaaccagggtcaggcgggtcattactttatcgatatacttcgccgtttgctctcccggacgaattcctggtacaaatgcaccggacttcttcaggttatctgctgtttcacgcgggttgaaaaccaacgccgtgtagaagaaacagaagaagatgattgcagacgcatagagtaacacataaagcggttgcccaggctgcaaatacaggctaattgttgtcagccagttccaaccagtaccgcccccgaaccaactcgcgatggtcgccgggaacagaataatactggaagcgaagattgccgggattacccccgccatattcactttcagcggtaaatgtgtgctctgtgcagcatagacacgacgaccttgctgacgtttcgcgtagtttaccacaatgcggcgttgaccacgctcaacaaatacaacaaagaacgtcactgcaaatactaatactgcaaccaacagcaacacgaggaagtgcaggtcgccttgacgcgcttgctcgatagtatgggcaatggctggcgggagtcccgcgacaataccggcgaagataatgatactaataccgttgccgatacctcgttcagtaatctgttcgcccaaccacatcaggaacatggttcctgtgaccagacttacaacagcggtgaagtagaatgcaaagcccgggttaatcaccaggccttgcataccaggcatattcggcagaccggtagcaataccgatgctctggaatattgccagcaccagagtaccgtagcgggtgtactggctgatcttacgacgaccagactccccttctttcttaatttctgccaacgttgggtgaaccaccgtcagcagctggataatgatgctcgcgctaatatacggcatgatccccagagcaaagatagaagcacggctgagagcaccaccagagaacatgttaaacatctcaatgatggtgcctcgctgttgctcaagcagtttggcaagtacagcggcatcaataccagggatcggaataaaagagccaatacggaacacaatcagcgcaccgataacaaacagcagtctgcgtttcagctcgcctaagccacctttggcactttgaaaatctaatcccggttgtttagccatctgctacttattcctcgattttaccgccagcagcttcgatagcagcacgagcgcctttagtaacacgcaggccacgaacagttaccggagtcgttacttcgccagccaggatcactttcgcgaactcgatctggataccgataatgttagccgctttcagcgtgttcaggtctactacaccgccttctactttagccaggtcagacagacgaatttcggctgtaatcgctgctttacgagaagtgaagccgaatttcggcagacgacggtacagaggcatctgaccaccctcgaaaccgcgacgtacgccaccgccagaacgagacttctgacctttgtgaccacgaccaccggttttaccgaggccagaaccgataccacgacccaggcgtttacccgcctttttggagccttcggccggagacagagtatttaaacgcatctcttactcctcaactttaaccatgaaggaaaccgcgttgatcataccgcgaatagcaggagtatcctcgcgctctacggtgtgaccaatacgacgcagacccaggccaagcagcgttgccttgtgtttcggcagacgaccgattgcactgcgggtttgagtaattttaatagtctttgccatggtttatttccccagaatttcttcaacggatttaccacgcttggcagcgaccatttctggagaattcatattttccaggccatcaatagttgcacgaaccacgttgatcgggttggtggaaccataggctttagccagaacgttatgaaccccagcgacttccagaacggcgcgcattgcaccaccggcgatgataccggtaccttcggaagccggctgcatgaatacgcgagaacccgtgtgaacacctttaacagggtgttgcagagtgccgttattcagcgcgacgttaatcatattgcgacgggctttttccatcgctttctggatcgctgctggaacttcacgcgctttaccgtaaccaaaaccaacgcgaccgttaccatcgccaactacagtcagagctgtgaaggagaaaatacgaccacctttaacggttttagatacgcggtttaccgcgatcagcttttcctgcagttcgccagcttgtttttcgatgtgagccatcttacacctctaccttagaactgaaggccagcttcacgggcagcatctgccagtgcctggacacgaccatgatattggaacccggaacggtcaaaggatacatctttgatgcctttttccagagcgcgttcagcgacagctttacccacagctgcagccgcgtctttgttaccggtgtacttcagttgttcagcgatagctttttctacagtagaagcagctaccagaacttcagaaccgttcggtgcaattacctgtgcgtaaatgtgacgcggggtacgatgtaccaccaggcgagttgcgcccagctcctggagcttgcggcgtgcgcgggtcgcacgacggatacgagcagatttcttatccatagtgttaccttacttcttcttagcctctttggtacgcacgacttcgtcggcgtaacgaacacccttgcctttataaggctcaggacgacggtaggcgcgcagatccgctgcaacctggccgatcacctgcttatcagcgcctttcagcacgatttcagtctgagtcggacattcagcagtgatacccgcaggcagctgatggtcaacaggatgagagaaacccagagacaggttaatcacattgcctttaaccgctgcacggtaacctacaccaaccagctgcagcttcttagtgaagccttcggtaacaccgataaccatactgttcagcagggcacgcgcggtaccagcctgtgcccaaccgtctgcgtaaccatcacgcggaccgaaggtcagggtattatctgcatgtttaacttcaacagcatcgttgagagtacgagtcagctcgccgtttttacctttgatcgtaataacctgaccgttgatttttacgtcaacgccggcaggaacaacgaccggtgctttagcaacacgagacattttttcctccgattaggctacgtagcagataatttcgccaccaagaccagcctggcgcgctgcacgatcagtcataacacctttagaggtagaaacaactgcgatacccagacccgccataactttcggcagctcatctttacgtttatagatgcgcagacctgggcggctgacacgctgaatgctttctacaacagctttgccctggaaatacttcagagtaagttccagttcaggcttggtgtcgccttcaactttaaaatcttcaataaaaccttcttccttcagcacgttggcgattgccactttcagcttggaggaaggcatggtgaccgcagctttgttcgcggcctgaccgttacggatacgggtcagcatatccgcgatcggatcttgcatgctcatctgtctttactcccgtgattcaattggtgacaattaccagctagcctttttcagacccgggatttcaccgcgcatagcggcttcacggaccttaatacggctcaacccgaacttccgcaggaaaccatgcggacgacctgtttgacggcagcggttacgctgacgagacgggctggaatcacgcggcagagtctgcagcttgagaacagcgttccaacgatcttcgtcggaagcgttcacatcagagatgatcgctttcagttcagcgcgtttcgcgaagtatttatcagctaaagctacgcgttttacttcgcgtgctttcatactttgcttagccatttagtaaccctaccttacttgcggaacgggaagtcaaaggcagccagcagagcgcggccttcttcgtcagatttcgcagtagtggtaatggtaatatccaaaccacgaacgcggtcgactttatcgtagtcgatttctgggaagatgatctgctcacggacacccatgctgtagttaccacgaccgtcgaaagacttagcggacaggccacggaagtcacggatacgaggtacagcaatagtgatcaggcgctcaaagaactcccacatgcgttcgccacgcagagttactttacagccgatcggatagccctgacggattttgaagcctgcaacagatttgcgtgctttggtgatcagcggtttttgaccggagattgctgccaggtctgctgctgcgttatccagcagttttttgtcagcgatcgcttcaccaacacccatgttcagggtgatcttctcgacccgagggacttgcatgacagaattgtagttaaactcagtcatgagttttttaactacttcgtctttgtagtaatcatgcagtttcgccatcgtactactccaaattacttgatagtttcgctgttagacttgaagaaacggacttttttaccgtcttcgaatctaaagcctacacggtcagccttgccggttgccgcattgaagattgctacgttggaaacctgaatagcggcttctttttcaacgatgccacccggttggttcagggccggaaccggcttctgatgtttcttaaccaggttgataccttcaacaatgaccttgccggaagacaggacattcttaactttaccgcgtttacctttatctttaccggttaacacgataacttcgtcatcacgacggattttcgctgccatgattcgctccttagagtacttctggtgccagagagataattttcatgaacttctcactacgaagctcacgagttaccggcccaaaaatacgcgtaccgataggctgctcgctgttgttgttcagaagaacacaagcattaccatcgaagcgaatgacagaaccgtccgggcgacgaacacccttcttggtgcgcaccactaccgccttcagcacatcaccttttttgaccttaccacgcggaattgcttctttgatggtgatcttgatgatgtcgcctacgcctgcgtagcgacggtggctgccacccagaaccttgatacacattacgcgacgtgcaccggagttgtcggcgacgttcagcatagtctgttcttggatcattttagtgctccgctaatgtcaactactactgagacccgaaaatcaggtcgttaaaaatccccatatcgagggcgcggcattataacaccgcttcaaggatatgggtagaaaaaataaacggctcatttctgagccgtttattcgtattgagagagtgtactgtattacagaaccgctttctctacaacgcgaaccagcgtccaggatttagtcttggacagcggacggcattcgcggatttcaaccacgtcaccgataccgcattcgttgttctcgtcatgtacgtgcagtttggtcgtacgcttgatgaatttaccgtagatcgggtgtttcacaaaacgttcgatagcaacaacaatggatttctccattttgtcgctaacaacgcgaccttgcagagtacggattttatcggtcattacgcacccgccttctcgttcagtaaagtcttaacgcgtgcgacatcgcgacgcacttgcttcaacaggtgagactgttgcagctggccacttgcagcctgcatacgcaggttgaactgctcacgcagcaggttcagcagctcggtgttcagctcttcaacgctcttctcacgcagctcttttgctttcattacatcaccgtcttagttacaaaggtggttttaatcggcagtttcgctgctgccagcttgaatgcttcacgggccagctcttccggaacaccgtccatttcatacaggactttacccggctgaatcaaggcaacccaatactccacgttacctttacctttacccatacgcactgccagcggcttttcagtgatcggtttgtccgggaacacacggatccagatcttaccttgacgcttaactgcacgggtcatagcacgacgtgctgcttcgatctgacgggcagtcagacgaccacggccaacagctttcagaccgaagctgccgaagctaacatccgtaccctgcgccagaccgcggttacggcctttgtgcattttacggaattttgtacgctttggttgtaacatcagcgacgctccttatttacggcctttacgctgctgctttttaggctgagcagccggtttttccggttgttcaacagcagccataccacccaggatctcgcctttgaagatccacactttaacgccgattacaccgtaagtggtgtgcgcttcagaggtgttgtagtcgatgtcagcacgcagagtgtgcagcggtacgcgaccttcgcggtaccattcggtacgtgcgatttccgcgccgcccagacggccgctaacttcaactttaatacctttagcgcccagacgcattgcgttctgtacagcacgcttcatagcacgacggaacataacgcgacgttccagctgagaagtgatgctgtcagcaaccagttttgcgtccagttcaggcttacgaacttcggcgatgttgatctgtgcaggaacgccagcgatgtccgctacgaccttacgcagtttttctacgtcttcaccttttttaccgataacgatacccgggcgagcagtgtgaatggttacacggatgctcttagccggacgctcgataacgatacgagatacggacgctttagccagttccttagtcaggtactgacgtactttaaaatcgctgtccaggttgtcagcgaattctttggtgttcgcaaaccaggtagagttccatggttttacaatacccaggcgaataccattaggatgtactttctgacccattgctagtctccagagtctcagcgatcggacacaaccacagtgatgtggctggtgcgcttcaggatgcgatctgcacgaccttttgcacgcggcataatgcgcttcatgctcgggccttcgtctacgaaaattttcgtaactttcagatcgtcaatgtcagcgccatcgttgtgttcagcgttagcaatggcagattccagaactttcttgaccagtacagccgctttcttgttggtgtaggtcaaaatatccagagcctggctcactttcttaccgcgaatcaggtcagcaacaaggcgaaccttctgagcagaagaacgagcatggcgatgtttagcgatagtttccatctcttcctcctaccttatttcttcttcgcttttttatcagcagcgtggccgcgataagtacgagtcggtgcgaattcacccagtttgtgaccaaccatttcgtcggttacaaataccggaacgtgctgacgaccattatggacagcgatggtcaaaccgatcatgttaggaaagatcgtactacgacgggaccaagtgcgcaggggcttcttgtctccgctttccaccgctttctctaccttcttcagcaagtgcaggtcaataaaaggacctttcttgagagaacgtggcatggcttatcctctaaaattatttgctacggcgacgtacgatgaatttatcagtacgcttgttgctgcgggtcttcttacctttggtctgaacgccccacggagttaccgggtgcttaccaaagttacgaccttcaccaccaccatgtgggtggtctaccgggttcatcgcggtaccgcgaacggtcggacgaacaccacgccagcgtgcagcacctgctttacccagaacgcgcagcatatgctcagcattgccaacttcgcccagagttgcacggcagtctgcttctactttacgcatttcaccagaacgcagacgcagggtgacataagcaccatcacgagcaacgatctgaacgtaagtaccagcggaacgtgccagctgaccgcctttacctggtttcatttctacgttatgaacagtagaaccaaccgggatgttgcgcatcggcagggtgttacctggtttgattgcagcatcaacgccagactgaatctggtcgccagctttcaggcctttaggggccaggatgtaacggcgttcaccgtctttgtacagaaccagcgcgatgttcgcggaacggttcggatcgtactcaagacgttcaacaactgccgggataccgtctttgttgcgtttgaagtcaacaatacggtaagcctgcttgtggccaccaccgatatgacgagtggtgatacggccattgttgttacgaccaccggatttgctgtttttttccagcaacggagcaaaaggtttgcccttgtgcagctcagggttaaccactttaactacgtggcgacgacccggagatgtcggtttacatttaacaactgccattgtattactcctccgacttactcagcgccgccaacgaagtccagattctggccttctttcagggtgacgtaagcttttttccagtcgctacgacgaccgatacgctgtccgtgacgtttaactttccctttaactaccagggtgttaacgacttcgacttcgacttcaaacagtttctgcacagcagctttgatttctgctttggtcgcgtctttagcaactttgagtacgatggtgttggatttttccatcgcagtagacgctttttcagaaacgtgcggtgcacgcagcaccttcagcagacgttcttcacgaatcatgccagcatctcctcaacttgcttaacagcatcagcagtcattacgactttgtcgaaggcgatcaggctaaccgggtcgataccagttgcatcgcgtacgtcaaccttgtgcaggttgcgcgcagccaggaacaggttttcgtccagctcaccggtgatgatcagcacatcttccagagccatgtctttcagtttctgtgccagcagcttagttttcggcgcttctacagagaacttctcgacaacgatcagacgatcctgacgtaccagttcggacaggatgcttttcagcgcgccgcggtacatcttcttgttaactttttgactgtggtcctgcggacgagcagcaaaggtcacgccaccagaacgccagatcgggctcttgatagaaccagaacgcgcacggccggtgcctttctggcgccacggttttttaccggaaccagttacttcagcacgagtcttctgagcacgagtaccctgacgagcaccagctgcataagcaacaacaacctggtgaaccagcgcttcgttgaaatcacgaccgaaggtagtttcggaaacagtcagcgcgctctgcgcgtctttcaatactaattccattgctatctccttacgccttcacagctggtttaacgatcaggtcgctaccggttgcacccgggacagcacctttaaccagcagcaggttgcgctcagcgtcaacgcgtactacgtcaaggctctgaacggttacacgttcgttacccatctgacctgccattttcttgcctttgaacactttgcccggagtctggttctgaccgatagaacccggaacgcggtgagacaaggagttaccgtgagtagcgtcctgggtacggaagttccagcgcttaacggtacctgcgaaacctttacctttagaggtgccagttacgtcaacttttttaacgtcagcaaacagttcaacgctaatgctctgacctacagtgaactcttcgccttcagccaggcggaattcccacagaccacggccagcttctacgccagctttagcgaagtggccagcttcaggcttggtcacacggttagcttttttagcaccggtggtcacctgaatagcacggtagccatcgttagccaggtctttaacctgagtaacgcggtttgcttcaacttcgattacggttactgggatagaaacgccgtcttctgtgaagatacgggtcatacccacttttttaccgactaaaccaatcattgtttcaacctctcaatcgctcaatgacctgattaacccaggctgatctgcacgtctacaccggcagccagatccagacgcatcagagcatcaacggttttctcggttggctcaacgatgtcaaccagacgcaagtgagtacggatttcgtactgatcgcgcgcgtctttgttgacgtgcggggagatcagaacagtgaagcgctctttgcgtgtcggcagcgggatcggaccacggacctgcgcaccagtgcgcttggcagtctcgacgatttccgcggttgcttgatcgatcagacgatgatcaaacgctttcaggcggatacggattctttggttctgcatgagaccagagctccaattattttataaacgaaaatgattactcctcagacccattacgattgatgggagagtgtaaccgttcttacgtagctccccgattgggagcattgttaggtagccaaattcggctaactgaggttcagattgaacctgctgtcaactacgacaagcccgcgcattatacatacttaaccaccgaacgcaagcgtattgctagtaaagtaaacagccttcgggttatctctcaagttcgttcagtgcatttttgacacgctctcttaaaccggctttctcttcgctttcttccacagtattttcttcgtcttcagaagaagagggggcattctcaaccgcgacgcctgggtcatcttcctcctcgacggattcgacgacggggagtggctgttttttgaagaaatagtgttgtgtactttgtttaaaagcgggcgtttcagcctctacagtgacttcggcttttactatccaaagcacccatagctgcctggcatacccaccaaccagcaccattcctgcaaaccacaggcaaatcagtaataaacaaattacatatattatggtgctgtgtttttgtcgggagaagataccagggtgacctgtttctttctgctcacgcgcggcgatatagaattcaaacattataatcccttgtgacgtaaaaactgcaaaacaaaagtcctacgcaggaattatttacgttttacgagaacccttcaatatgaattaaattacggcattaaaaataagaaaaaagcctgacaaatgaagcattttaaaaacagaaacattcatatttaaaatgttaaattgaattgatattttaaatatgaataatttattcgttctgacagtacgaataagatatgccgtcaacaaatgcaaaaagggcgccgaagcgcccttttcaattcaaaactaattaacgtgtaattagcccagaactttagcaacaacgcccgcgccaacggtacggccgccttcacggattgcgaaacgcagaccgtcgtccatcgcgatcgggtggatcagggtaacaaccattttgatgttgtcgcccggcattaccatctctacgccttccggcagttcgatggtaccagtcacgtcagtagtacggaagtagaactgcggacggtagcctttgaagaacggagtatgacggccgccttcatctttggacagaatgtacacttcagattcgaacttggtgtgcggcttgatggtgcccggcttagccagtacctgaccacgttcgatttcttcacgtttgataccacgcagcagaacacctacgttctcaccagcacggccttcgtccagcagtttgcggaacatttcaacgccagtacaggtagacttctgagtctctttgataccaacgatttcaacttcttcaccaactttgatgataccgcgttctacacgaccggtaacaacggtaccacgaccggagatggagaatacgtcttcgatcggcagcaggaacggcttgtcaatcgcacgctctggttccggaatataagaatccaggaagccagccagttccaggattttcgcttcccactctgcgtcgccttccagcgctttcagagcagaaccacgaacgatcggagtgtcgtcgcccgggaagtcgtactgagacagaagttcacgaacttccatttcaaccagttccagcagctcttcgtcatcaaccatgtcgcatttgttcaggaacacgatgatgtacggaacgcctacctgacgacccagcaggatgtgctcacgagtctgcggcatcgggccgtcagtcgcagcaactaccaggatcgcgccgtccatctgagcagcaccggtgatcatgtttttaacatagtcggcgtgccccgggcagtctacgtgtgcgtagtgacgggtcggggtgtcgtattcaacgtgagaagtgttgatggtgataccacgagctttttcttccggcgcgttatcgatctggtcgaatgcacgagcagcaccgccgtaggttttagccagtacggtggtgattgcagcggtcagagtagttttaccgtggtcaacgtggccgatagtaccaacgttaacgtgcggttttgtacgttcaaatttttctttagacacggctatattccttactatagtgctctccccttcaggagagagcacgggactttggtattaacccttaggcttatttaccacgggcttcaattacggcctgagcaacgttactcggcgcttcatcatacttcaggaattccatagtgtaacttgcacgacctttggtcagagaacgcagctgagttgcgtatccgaacatttcagacagcggtacttcagcgtggatcttaacgccagtaacttcagattcctgacctttgagcataccacgacgacggctcaagtcaccgataacgtcaccggtgttctcttccggagtttctacttcaaccttcatgatcggctcaagcagaactggtttcgctttcttaaagccttctttaaaggcgatagaagcagccagtttaaacgccagttcagaggagtcaacgtcatggtaagaaccgaagtgcagacgaatacccatgtctactaccgggtagcctgccagcggacctgctttcagctgttcctggatacctttatcaacggccgggatgtattcgccagggattacaccacctttaatgtcgttgatgaactcgtagcctttcgggttactacccggctccagcgggtacatgtcgataacaacatgaccatactgaccacgaccaccagactgtttcgcgtgtttaccttcaacatcggtaactttctggcggatagtttcacggtaagcaacctgcggtttacctacgttcgcttcaacgttgaattcacgcttcatacggtcaacgatgatgtcgaggtgcagttcgcccatacccgcgatgatggtctggttagattcttcgtcagtccatacacggaaagacgggtcttctttagccagacggcccagagccagacccattttttcctggtcagctttggttttcggttcaactgcgatggagattaccggctcagggaattccatacgttccagaatgatcggcgcatccgggtcacacagggtgtcaccagtggttacgtctttcagaccgatagcagcagcgatgtcgcccgcgcgaacttctttgatctcttcacgtttgttagcgtgcatctgaacgatacgaccgaaacgctcacgtgcagctttcacggagttcagtacggtatcaccagagttaaccacaccggagtaaacacggaagaaggtcaggttaccaacaaacgggtcggtagcgattttgaacgccagtgcagagaacggctcgtcatcacttgcgtgacgttcagccggagtgtctttaccgtcgtccaggataccgttgatcgcaggtacgtcaaccggggatggcaggtaatcaattaccgcatccagcatcgcctgaacacctttgttcttgaacgcagaaccacaggttaccaggatgatttcgttgttcagaacgcgctgacgcagagcacctttgatttctgcttcagtcagttcttcaccacccaggtatttttccatcagctcttcagaagcttcagctgcggattcgatcaggttctggtgccattcgttagccagttcaaccatgtctgccgggatatcttcgtattcgaaggttacgccctggtcagcgtcgttccagttgatagctttcattttcaccaggtcaacaacaccggtgaaatgttcttcagcaccaatcgccagctgcagcggaaccgggttcgcgcccagacgggttttgatctggttaacaactttcaggaagttcgcacccatgcggtccattttgttaacgaacgcaatgcgcggaactttatatttgtttgcctgacgccatacggtttcagactgcggctgaacaccaccaactgcgcagtaaaccattaccgcaccatcgagaacacgcatggaacgttctacttcgattgtgaagtcaacgtgccccggggtgtcgatgatgttgatgcgatgcggctcatactgcttagccataccagaccagaatgcagtagtcgcagcggaagtgatggtaataccacgttcctgctcctgctccatccagtccatggttgcagcgccgtcatgaacttcaccgattttatggtttacaccggtgtagaacagaatacgttcggtagtagtggttttaccggcgtcgatgtgcgcactgataccgatgttacggtagcgtgcgatgggtgttgtacgagccatttgtttcctcgtttatcttttaggcgttcaatttaagtagcccaaagcgggctgcttactggaagcgcccgcctggtgactaaaactccgaagggataaccaacggtagtgtgcgaacgccttgttggcttcggccatacggtgaacgtcttcacgtttcttaactgcagtacctttgttttctgcagcatcagaaagttcgttcgccaggcgcagagccatggatttatcaccgcgtttacgagcagcttcaacgatccaacgcattgccagagcattacgacgaaccggacggacttcaactggtacctgataagtagaaccaccaacgcggcgagacttaacttctacagtcgggcgcacgttttcgagagctacttcgaatgcttccagttcagatttaccagagcgctgagccagggtctccagcgcgctgtatacgatagattcagcagtagattttttaccatctaccatcaggatatttacaaatttagccagcagttcacttccgaacttcggatccggcagaattttacgctgaccaatgacgcgacgacgtggcatggaaatactccgttgttaattcaggattgtccaaaactctacgagtttagtttgacatttaagttaaaacgtttggccttacttaacggagaaccattaagccttaggacgcttcacgccatacttggaacgagcctgcttacggtctttaacgccggagcagtcaagcgcaccacgtacggtgtggtaacgaacacccgggaggtctttaacacgaccgccacggatcaggatcacggagtgctcctgcaggttgtgaccttcaccaccgatgtaggaagtcacttcgaaaccgttagtcagacgaacacggcatactttacgcagcgcggagttcggtttacgaggagtggtagtatatacacgagtacatacgccacgtttttgcgggcatgcttccagcgcaggcacgttgcttttcgcaactttgcgagcacgtggtttgcgtaccagctggttaactgttgccattaaatagctcctggttttagcttttgcttcgtaaacacgtaataaaacgtcctcacacaatatgaggacgccgaattttagggcgatgccgaaaaggtgtcaagaaatatacaacgatcccgccatcaccaggccatctggctggggtgcttaaccgtaagtctgacgaaatcagtatagtcaatgagaatgatgtcgttgctaatttgaccagtcaaaccgcgggcaataaggtcttcgttcagggcatagaccttaatgggggcattacgcagactttcaaggtagcggttaccgtcaactgcggcagttacgccatcttgcaataatagcagttcgtctccttcactgagcagacgcagcagcgcagcaaaatccgtcagccagggactgcgatgtaatgtgtgcagcataaacgcctcaaaacctcaaaataacatcgtagttggcgagttcgcggcgtaaggcatctgcttcgagcggcgtggcttcgacaacaaagggtgtctgcggatctaacccgcgttcgcgcagactagccgcacaaacccagcactgttcaatgtcgtacagacccaacaatttaaaagtggcaatgtaatcacgcgccagcactgcatcgggcttttgtcctggcagcagctgaaaaacgccatcagctataaagaagacagccagatcgtcagttaatgcggaagttgccagtaaagcatctaaaccttcccggcctgcggctgtaccatgaggtgcagtagaaaaaacaaacgcaattcgtttcatcagaactgtaccaccctgtcacaggtcaggctggcttccgccagcgccccaagtccgcttaaggtaaatccctgctgaaggttactgctagccagccccagtcttccggcctccgtttcatcaacaacgccacggcgtaatgctgccgctacgcagatattcagcgccacaccatgttgcgcattcagttgttgccaggcccgtacgaggtcaaattcgtcacttgccggagaggtcaattggttagcgttatagaccccttcccgatagaaaaagacgctgcttaactcatggccatctgctatcagcgcctgcgcaaactgaaaagcactactcgcctgttgcgtaccgtatgctggcccggtcaccacgatggcaaaacgcattacttatcttgcccctggaaatcaccgctcttgaactggcggatgtagagatagacagtgtgtttggagatgttcaggcggtcagcaacctggttgatcgcatctttaatatcgaagatccctttctcgtagagattcagcacgatctgacgatttttggcgttattagaaacattgcgatcggcattcacttcttcgatggtgaactccagcgtttgggtaaccagatcttcaacagaagaggcaaagttgacgctactaccgacatccggggtttctggcggcacaaaggtgctcataatctggctgaagggaacatcaagattcatattgatgcacagcagaccaattacacgctgttcgcggttacgaatcgcgatagtcagggacttcattaatacgccgcttttggcgcgagtaaagtagcatttagaaacgctgctatccgctcccgtcatatcgtgcagcatacgtagcgccaggtcagtaattgggctaccaatcttccggcctgtatgttcaccgttagcaatgcgaatggcactacattttagatcctgcaaagagtgcaaaacgatttcacagtgggagccaataagcatcgctaacccgtccaccaccgcttcgtaggatttcagaatatcaaaatcggtctggtcgaaaggacgttgatccagtaaatccaactcactggtttcgttggttaaaaggctcctggacatgaaaaaaaacactccttttcaggagcctgtcgttaacttttcagggcaggctcattaatgatgcgggtaactaaattaatacagcggaggttccgctttccagcactaattatatccggcctgtaataaaaaaaccgccgcctggtcaggcggcggttcttaatgcttattttttagcagaatctgcggctttcgcatcagcttccggctttgcatcagccttcggcgctggtttcacatccagcagctctacgtcaaacaccagggtagaattcggtgggatccccggaacacccgctttgccgtaagccagttctggtggaataaccagtttgatcttaccgcctttcttgatgttcttcagaccttctgtccaacccgggataacaccgtccagacggaaagaaagcggttcaccacgggtgtaagagttgtcgaactctttaccgtcgatcagcgtacctttgtagttcactacaacagtatcgctgtctttcggtgcttcgcctttaccggcttctactacctgataaaccagaccagtactagaggttttcacacctttctctttggcaaatttctcgcggtactctttaccttttgcttcgttatcagccgcgtctttttccatcttcgcctgagcagaagacttcacgcgagcttcgaatgcttgtagagtctgttcgatctcttggtcggagagtttgcttttatcagcaaatgcatcctgaacaccagcgatcagctgatctttatccagtttgatgcccagtttttcttgttcttttagagagttttccatgtaacgacccaggctggcacccagtgcataagcacttttctgatcgtcatttttgaacgctgctttgctgtcagcagctgtagcaggttttgcagcttcagcagcaaaagtgattggtgcatgcagggcaacggccattgtggtcgccagcagcgttactttaaacagacttttcatccatatctccaggatcggggcatctcaccccagggttaactattatcagaagggtactataaagcgttgtcgaacaaatctacatacagacacgccctattatcatctattttcagactctttttgtttaaattagtttcgatgaccgcgaaatgagtgctgtctcgggcagcaaagttaagtagaatccgcggcgaccattcgacaaaagaggtgaatcatgcaggatttaagtttggaagcacgcctggcagagctggagagccgactggcttttcaggaaatcaccattgaagaactgaacgtcacggtgaccgctcatgaaatggagatggcgaaactgcgcgatcatctgcgtctgctgaccgagaagttaaaagccagccagccgagcaacatcgcgagccaggctgaagaaacgccaccgccacattattgaggcgtaaaaaaagcggggattccccgcttttttgtcactttttcggtattagtggcaaccgcaaccgccgttgcctttaccgccacagcagccttcgccaccgtgttcatgaccgtgatcgtggccatgaccgccgcagcaaccgtcgtggtcgtgatcgtggtggtgatcgtgcgcgccgtgaacgtgaccatgagccagttcttcttcagtcgcttcgcgaatcgccacaacttcaacgttgaatttcaggttctgaccggccagcatgtggttaccatcaaccacgacgtgatcgtcttcaaccgcagtgatttcaaccggtaccggaccctggtcggtttcagccaggaaacgcatacctacctgcagttcatcaacgcccataaatacgtctttaggaacacgttgcaccaggttttcgtcgtactgaccgtaagcgtcgttcgcgccaacagcgacatcaaatttgtcgccaacttcatgaccttccagcgccgtttccaggccagagatcagggaaccgtgaccatgcaggtagtccagcggcgcactcaccggagactcatcaaccaacacaccgtcttctgtacgtacctgataggccaggctgaccaccaggtcttttgctactttcatgatatctcctgagcatgggaagaatagtggcgcagattgtagcggaattctgcagccgtgtactcactagcttaaaaaaactcggcgcatatcgttagtccggatgaaaaatcccgatcacttgctcatctttgcgaacgtgatcgcgggcttctttgtctgcttctcgcatctgatgtccgcacttaacacattcaacaatatcaatattattttcgcgccacatcgccatactatcctgcgcctgacaggccgggcattttgcgcccgcaataaaacgttttcggattgccatctttaccctttactcaaattcatcccagccgtccagctggcgtcgttcttgttgcatttcacgctggaaaatctcttccagttcgcgtcgggcttccctggcgcgagaaatttgtacggtatcggcatgcattgggatgagctctcgcagcatccgcatatccaggcggcgaaaatgcagttgcgctcgctgtgcctgatgcggatgcatgccaagcgtgaccagcgtcttgcgccccagctctaacgcactggagaatgtttcacgggaaaactgcgtcacccctgcctgtaataactcatgcgcttccacacgtccgcgcgctcgcgcaagaatatgcaaatgcggaaagtgctgttggcatatttccaccagcttcatggtgtcttccggctcgttacaggtaatgacgatagactcagcggcctctgcacccgcagaacgtaaaagatcgacctgcgtggcgtcgccgtaataaactttgtagccgtatttacgcatcaggttaacggcgctgatatcccgctccagcacggtaatgcgcattttatttgccatcagcaaacgaccaatcacctgaccaaaacgcccgaagcccacgacaatgacctggggtttatcatcgttgacccacggtttttcgtcttcttcttccggtccgttaaactggcgggatagccatttatccaccagcttcatcagcaacggcgtggtcatcatggaaagcgtcaccgtcaccagcaacaacgccatctggtcgccctggaataagcgttgactagaagcggtagaaaagaggacaaaggcaaactcaccaccctgactcaacacgccagcaaactgcatccgctcactgctacgcacgccatacaatcgcgccagcagatacagcacgagaattttcaccgccaccagcacaaccacgcttatcactacccacaacagatgggtataaagcaccccgaggttgagactcatgccgacagagataaagaacaaaccgagcagcaagcctttgaagggatcgatagccgtttccagttcatggcgatattcactttccgccagcagcacgcccgcaataaatgtaccgagcgccatgctcagccccagcgcatccataaacaatgcggaacccaacaccagcagcagcgtcgcggcggtgaacacttcccgcacgccagaagctgcaataaagcggaataccggacgcagtaaatagcgcccaccaatcagcatgccgacaaacgccagcaccttcatgccgaccttcatccagtcgaaatgttcgtctgcgctccccgccaacaacggcactaacgccagtgctgggattactgccagatcctgaaacagcagaacgctaaacccgagctggccggattcgctgcgattcatccctttctcacgcatcaattgcaacgccattgcagtactagacatcgcaaggccaatgccaccgaccaccgccgcctgccaggcgaaatccgtcagcatcaataatcccgccagcaacgccgcgcttaacagcacctgtgccgcgcctacgccaaaaatgctacgccgcagttgccaaagtttggagggattcaactcaaggccgatgataaacatcaggaataccacgccgagttcgctaaagtggaggatctcatcgacgtcgctaataaaccccagcccccacgggccaattgcaatccctgccagcaaatatcccaacacagcgccaatacccagccggcttgccagcggcaccgcagccaccgccgcgaagagaaacagcactcctgcgagtaaaaaatcggaaccttccatcagcggcctcctggagacagcggatttgccagccagtcaccgtaggctctggcgtggctcgccagctcctgtgcgctttgccgtctcgcccagtaaataatgatgggacttaaccaatgcatccggcacatgcccgccgccagttcaaaggggcgcagcacatcgctcatcgggtagcgattcagcgcgtcataacggtaagcactttccggctcgccggtggtaatcacgctacgccagtactttcccgccagttggtttcctcccggcccgctggcaaaaccacgacttaatacccggtccagccactctttcagtagcgccgggcagctataggtataaagaggatgctgaaagacaatcacctcgtgctcgcgcagtaatgcctgctcacgggggatatcaataaaaaaatcgggatagtgcgcgtaaaggtcgtgcacggtaacattgctgagctgcgtggccggtttaagcagtacccggtttgccacgctgtcctgagattccggatgggcatacagcagcaaaactttcgctggctgagacatcatccccctcccggtatggtttttgtgtatagtcgctgttttgggctaccattgcgcccggtgcggcagctcgcccatacattacattatcataatgataagttaacatagtctgaacatacggcaccttatgattgttttctccagcttacaaattcgtcgcggcgtgcgcgtcctgctggataatgccaccgccaccatcaaccctgggcagaaagtcggcctggtgggtaaaaacggctgtggtaaatctaccctgctggcattgctgaaaaatgaaatcagcgccgacggcggcagctacacctttccgggaagctggcaactggcgtgggtgaatcaggaaacgccggcgttaccgcaagcggcgctggaatatgtcattgacggcgaccgtgaatatcgtcaactagaagcgcagctacacgacgccaacgaacgtaacgacgggcacgccattgcgaccattcatggcaagctggatgctattgacgcatggagtattcgctcccgtgctgccagcctgctgcacggcctcggtttcagcaatgaacaactggagcgcccggtaagtgatttttccgggggctggcgtatgcgtcttaaccttgcccaggcgctgatttgccgtagtgacttgctgctgctcgacgaaccgactaaccacctcgatctcgatgccgttatctggctggaaaaatggctgaagagctatcagggcacgctgatcctgatctctcacgaccgcgacttcctcgatccgatcgtcgataaaattattcatatcgaacaacaaagcatgttcgagtacaccggcaactacagtagctttgaagtacagcgcgccacccgtctggcgcagcaacaagcgatgtacgaaagccagcaggaacgcgtagcgcatctgcaaagttatatcgaccgtttccgtgccaaagccaccaaagcgaagcaggcccagagccgcattaagatgctcgagcgtatggagctaattgcccccgcgcacgtcgacaacccgttccgctttagcttccgcgcgccggaaagcctgccaaatccgttactgaagatggaaaaagtcagcgcgggctatggcgatcgcattattctcgacagcattaaactgaacctggtgcccggcagccgtattggtctgttaggccgcaatggcgcgggtaaaagcacattaatcaaactgttagccggtgaacttgcgccagtcagcggtgaaattggtctggcgaaagggatcaaactcggctacttcgcccagcatcaacttgaatacctgcgcgccgacgaaagtcctattcaacatctggcacgtttagcgccgcaggagctggaacaaaaactgcgtgactacctcggcggctttggtttccagggcgataaagtaaccgaagaaacgcgccgcttctccggtggggaaaaagcccgcctggtgctggcattaattgtctggcagcggccgaatctgctgctgctcgacgaaccgactaaccaccttgacctcgacatgcgtcaggcactcaccgaagcattaatcgagtttgaaggcgcgctggttgtcgttagccacgaccgtcatttgctgcgttccaccactgacgatctctacctggttcacgatcgtaaagtcgaaccgttcgacggcgatctggaagattatcaacagtggttgagcgacgtacaaaagcaggaaaaccagaccgacgaagcgccaaaagagaatgcgaacagcgcccaggcacgtaaagatcagaagcgtcgggaagctgagctgcgtgcgcaaacccagccactgcgtaaagagattgcccgtctggaaaaagagatggagaagctgaacgcgcaactggcgcaggcggaagagaaactcggcgacagcgaactgtatgaccagagccgtaaagcggagttgaccgcctgcctgcaacagcaagccagcgccaaatccggcctggaagagtgcgaaatggcatggctggaagcccaggagcagcttgagcagatgctgctggaaggccaaagcaactgatggcgcagataacgacgaccgatgccaatgaattcagcagcagtgctgaattcatccccatgcgcggctttagcaattgtcatctgcaaaccatgctgccgcgtctgtttcgtcgtcaggtgaaattcaccccgtactggcagcggctggagttgcccgacggcgattttgtcgatcttgcgtggagtgaaaaccctgcacaggcgcaacataaacctcgtctggtggtgtttcacgggctggaaggcagtctcaacagcccttacgcccacggtctggttgaggcggcgcaaaagcgcggctggctgggcgtggtgatgcattttcgcggatgcagcggtgaaccaaaccgtatgcaccgcatttaccatagcggcgaaaccgaagacgccagttggtttttacgctggctgcaacgcgaatttggtcatgcgccaacggctgccgtcggctatagcctcggcggtaatatgctggcctgtttgctggcaaaggaaggcaatgatctcccggttgatgcggcggtgattgtctctgcgccgtttatgctggaagcctgtagctatcatatggaaaagggcttttcccgcgtttatcagcgttacttgctgaacctgttaaaagccaatgccgcgcgcaagctggcagcctaccccggaacgctgccgattaatctcgcgcagttaaaaagcgtacgtcgcatccgtgaatttgacgatctcatcaccgccagaattcacggctacgccgacgctatcgactattatcgtcagtgtagcgccatgccgatgctgaaccggatcgccaaaccgacgctgattattcacgccaaagacgatccgtttatggatcatcaggtgatcccgaaaccggaaagtctccccccgcaggtggagtatcaactgactgaacatggcggtcatgttggctttattggcggtacattacttcatccgcaaatgtggctggagagtcgcattcctgactggttaacaacgtatctggaggcgaaaagttgttgatattaacgtatctggaggcgaaatcatgttgattccgtggcaagacctctcccccgaaacgctggaaaatttaattgaaagctttgtgttacgtgaaggcaccgattatggtgaacatgagcgtacacttgaacagaaagtcgccgacgtcaaacgccagctacagtgcggagaagcggtgctggtatggagcgagctgcacgaaacggtcaatattatgccgcgcagtcagtttcgcgaataacctgcaaccgtcggcggacgagataataatgatagctaagtcatggagttactatgtctgccaaacatccggtcattgcggtaacaggatccagcggcgcggggaccaccaccaccagcctcgcgtttcgtaaaatattcgcgcagttaaatctgcatgcagctgaggtggaaggcgacagttttcaccgttacacccgcccggaaatggacatggcgatccgcaaagcgcgcgacgccgggcggcatatcagctacttcggccccgaggctaacgacttcggcctgctggaacaaaccttcattgaatacggtcagagcggcaaagggaaatctcgcaaatatctgcatacctacgacgaagccgtaccgtggaatcaggtaccggggacattcaccccctggcaacctttaccggaacccactgatgtactgttttatgaaggtttacacggcggcgtagtcacgccacagcataacgttgcgcagcatgtggacttactggtcggcgtggtgcctatcgttaaccttgagtggattcaaaaactgatccgcgacaccagcgagcgcgggcacagtcgagaagcagtgatggacagtgtagtgcgtagtatggaagactatatcaactacatcacaccgcagttttcccgcacccatcttaacttccagcgcgttcccaccgtcgacactagtaacccgttcgcggcaaaaggtatcccgagcctcgatgaaagctttgtggtgatccattttcgtaatctggaagggatcgatttcccctggctgctggcgatgttgcaaggcagtttcatttcccacatcaatacgttagtggtaccgggcggcaaaatgggtctggcaatggaattaattatgctgccgctggtgcaacgattgatggaaggaaagaaaatcgagtaactctgctattacgccggataaaatactatccggcttcacaacgggatagttaagtcacgcggcaaccacttcatagctgtgagtaatattcaccgctttttccagcatcaacgccacactacaatatttctcggcagagagatcaaccgcacgcgcaaccgctgcgtctttcaggtcgcgaccggtgacgataaaatgcagattaatgtgcgtaaacaggcgtggtgcctcttcgcggcgttcagaggtcaattttacttcacaatcgaccacatcctgacgccctttttgcaggatgctaaccacatcgatggcactgcaaccacccgccgccatcaacaccatttccatcggacttggtgctttatcgccactgttgccgtccattaaaatctgatgaccagaggcggattcgcccagaaaagttaacccttcgacccacttcactcgcgcttgcatttttgctactccactgcgtcaattttcctgacagagtacgcgtactaaccaaatcgcgcaacggaaggcgacctgggtcatgctgaagcgagacaccaggagacacaaagcgaaagctatgctaaaacagtcaggatgctacagtaatacattgatgtactgcatgtatgcaaaggacgtcacattaccgtgcagtacagttgatagccccttcccaggtagcgggaagcatatttcggcaatccagagacagcggcgttatctggctctggagaaagcttataacagaggataaccgcgcatggtgcttggcaaaccgcaaacagacccgactctcgaatggttcttgtctcattgccacattcataagtacccatccaagagcacgcttattcaccagggtgaaaaagcggaaacgctgtactacatcgttaaaggctctgtggcagtgctgatcaaagacgaagagggtaaagaaatgatcctctcctatctgaatcagggtgattttattggcgaactgggcctgtttgaagagggccaggaacgtagcgcatgggtacgtgcgaaaaccgcctgtgaagtggctgaaattagctacaaaaaatttcgccaattgattcaggtaaacccggacattctgatgcgtttgtctgcacagatggcgcgtcgtctgcaagtcactagtgagaaagtgggcaacctggcgttcctcgacgtgacgggccgcattgcacagactctgctgaatctggcaaaacaaccagacgctatgactcacccggacggtatgcaaatcaaaattacccgtcaggaaattggtcagattgtcggctgttctcgtgaaaccgtgggacgcattctgaagatgctggaagatcagaacctgatctccgcacacggtaaaaccatcgtcgtttacggcactcgttaatcccgtcggagtggcgcgttacctggtagcgcgccattttgtttcccccgatgtggcgcagactgatttatcaccccgatatcaactatgcacttcgacaaacgctggtgctatgtttgcccgtggccgttgggttaatgcttggcgaattacgattcggtctgctcttctccctcgttcctgcctgttgcaatattgcgggccttgatacgcctcataaacgttttttcaaacgcttaatcattggtgcgagcctgtttgccacctgtagcttgctgacacagctactactggcaaaagatgttcccctgccctttttgctgaccggattaacgctggtacttggcgtcactgctgagctggggccattgcacgcaaaattgcttcctgcaagcctgctcgccgccatttttaccctcagtttggcgggatacatgccggtctgggaaccgttgctcatctatgcgttgggcactctctggtacggattgtttaactggttttggttctggatctggcgcgaacaaccgctgcgcgagagtctaagtctgctgtaccgtgaactggcagattattgtgaagccaaatacagcctgcttacccagcacaccgaccctgaaaaagcgctgccgccgctgctggtgcgccagcaaaaagcggtcgatctaattacccagtgctatcagcaaatgcatatgctttccgcgcaaaataatactgactacaagcggatgctgcgtattttccaggaggcgctggatttacaggaacatattagcgtcagtttgcatcagccggaagaggtgcaaaagctggtcgagcgtagccatgcggaagaagttatccgctggaatgcgcaaaccgtcgccgctcgcctgcgcgtgctggctgatgacattctttaccatcgcctgccaacgcgttttacgatggaaaagcaaattggcgcactggaaaaaatcgcccgccagcatccggataatccggttgggcaattctgctactggcatttcagccgcatcgcccgcgtgctgcgcacccaaaaaccgctctatgcccgtgacttactggccgataaacagcggcgaatgccattacttccggcgctgaaaagttatctgagtctaaagtctccggcgctacgcaatgccggacgactcagtgtgatgttaagcgttgccagcctgatgggcaccgcgctgcatctgccgaagagctactggatcctgatgacggtattgctggtgacacaaaatggctatggcgcaacccgtctgaggattgtgaatcgctccgtgggaaccgtggtcgggttaatcattgcgggcgtggcgctgcactttaaaattcccgaaggttacaccctgacgttgatgctgattaccaccctcgccagctacctgatattgcgcaaaaactacggctgggcgacggtcggttttactattaccgcagtgtataccctgcaactattgtggttgaacggcgagcaatacatccttccgcgtcttatcgataccattattggttgtttaattgctttcggcggtactgtctggctgtggccgcagtggcagagcgggttattgcgtaaaaacgcccatgatgctttagaagcctatcaggaagcgattcgcttgattcttagcgaggatccgcaacctacgccactggcctggcagcgaatgcgggtaaatcaggcacataacactctgtataacagtttgaatcaggcgatgcaggaaccggcgtttaacagccattatctggcagatatgaaactgtgggtaacgcacagccagtttattgttgagcatattaatgccatgaccacgctggcgcgggaacaccgggcattgccacctgaactggcacaagagtatttacagtcttgtgaaatcgccattcagcgttgtcagcagcgactggagtatgacgaaccgggtagttctggcgatgccaatatcatggatgcgccggagatgcagccgcacgaaggcgcggcaggtacgctggagcagcatttacagcgggttattggtcatctgaacaccatgcacaccattagcagcatggcatggcgtcagcgaccgcatcacgggatttggctgagtcgcaagttgcgggatagcaaggcgtaatgcaggctaaaccatcggataaggcattcacgccgcatccgacatcttttgcctgatgcttcgtatttacgccccaaccaccttcgccaccgcgtgggcgaaacgttgcatcccttcatcgatatccgcatcttccaccaccaggctcggtgcaaaacgcatcacatccggtccggcattcagcaccattacgccagcctctgcgcccgcatacaggaaatcacgcgcccgacctttgtactgtggtttcagctctgcgccaatcaacagccccataccgcgaatatcgctaaatacatcgtactgctgatcgatcttctgcagatggtcaacaaaacgctggcgtttcgcctgaatgccttccagcacttcaggggtattgatgatatcaaacgccgcccccgctactgcacaggccagaggattaccgccgtaggtggaaccgtgagaaccaggatgaaacgcagaagcaatttccgccgtggtcagcatggcgctaatcgggaagccgccgcctaacgctttcgcagaggtcagaatatccggcgtaacgccgtagtgcatgtaagcaaacaaatcgccggtccgccccatcccgcactgcacttcatcaaacaccaataatgcctgatgttgatcgcacagctcgcgcaagccctgcaaaaactctggcgtcgctgccgtcacaccgccctcgccctggatcggctcaaccaccaccgcacaggtgtgatcatccatcaccgctttcactgcatggagatcgttaaagggaacgtggatgatgtctgccggtttcggcccaaagccgtcggaatattttggctgcccacccacgctaacggtaaacaggctgcgaccatgaaaagcgttatggaaggcaataattttggttttgaacgggctatgacgcacacaggcgtaatggcgtgccagtttaaaggcggtttcgttagcttccgtgccggagttcataaacaccacgcgttcggcaaacgttgcctcaatcagtttacgcccaagacgcagcgccggttcattggtgaaaacgttactgatatgccacagagtttcgccctgggtttttaacgcgttcaccagcgcaggatggcaatggcccaacgccgtaactgcaatgccacccgcgaaatcgacatactccttgccttgctgatcccagattcggctgccctgaccttttaccggaataaactctgccggagcataaatcggcaggatcacttcatcgaaagtcgcgcgtgtaattgctgtttgttcaattgccatctcatgatcaccctgttacgcataaacaaatgtgaaattataaccacaaaatatgcataaaaaatcactaaatggcaatcagaaatcagcgatgcaggaaattagccagcagttgatgtccttgttcgctaagaatactttctggatggaactgcacaccttccagatcccactggcgatggcgaatccccataatctctcgggtttcgctccaggccgtcacgtcaaagcacgctggtaaactgtcaggttccaccaccaggctatggtagcgtgtcacggtaagtggatttgccagcccccgaaatacgccctcaccgttatgtgtaatcgggctggttttgccgtgcatgacctttgcggcgcgcacaactttaccgccaaatgcctgcgccattgcctgatgaccgaggcagacgccaagaatcggcaagcgcccggcatagtggcgaataacgtcaagggagatcccggcttcatctggcgtacaggggccaggactgatgacaattttttgtggtttaagggcgtcgatatccgccagcgtcaacgcatcgttgcgcttaaccagcacatccgcccccagttcacaaaagtactggtagaggttccaggtaaaagaatcgtagttatctataagcaggatcatggcggctccggtacaaaagaaccgcgctattttactcagattccccggcttcgcttaccactttgctaaatatcatctgcagtgcggtgagatcccccattgccccactctgatttgcctgattccaggcctctttttcgataccctgccagctcagttgatatccggcatgaatcgccagttgctcgaagaagatccgctgtgccagaccacttcccacccggaagggatgcagcacgttgatttcacaatagtaatgcgccagccgctcgacgaacttcgctttctccaggccaaccagataaccttcttcctccagatcctgcatcagggcattgccctctttttcgatataagcaaagtggcagaacggcgtatcaccctgataaatatcaacttcacgcagttgccctgcccagtcgaaaatatcctgatacagctggcgatggatagttcgcaaatgcggtaaaccgcgcaccagcggaccaagctcaatggtcgcagcacgcagcgccgtcatttcgtaagcggcctgttccagccgctgctgctggcggatgttcagccggttacgcatgatatcaaggcctggataaagatacggatcgcgcccttcgccgaatttatcgctcatagtgactcctcagctcttcaaggcgcgctaaagcctctgcggcagtaagagtgactaaaggcatctcgacgccttcaagacggcgactggcctgaaaattacgattacgctgaagctcccagagacgggacttttgcttatcggtgagtttcttcacttgatgcctccctgaacgtgtccatttgccacaagtataagcggcaaatccgggttacgccgggagagcagaagcgcgggcaagattgcccgcgcgagaaatcattacggcaggactttagcggaaaggataactaccggtttactcggcacattctggtacggaccaacgtcatgagtcggcacctgggaaatcttatcggcaacgtccatgcctttcaccactttaccaaataccgcgtaaccgaaatcacgctgaccatggtcaaggaaggcgttatcggcaacgttgataaagaactggctggtggcgctgtctttgtcagcggtacgtgccatcgcgatggtgccacgcgtgttgcgcaggccgttatcggcttcatttttgattggcgggtttggttttttctgctgcatctgctcggtgaaaccgccgccctgaatcataaagccaggaatgacgcggtgaaaggtagtgttgttataaaaaccgctgttcacataatcgacaaagttttgcacagacactggcgctttttgtttatccagctccagttcgatgttaccagcactggttgtcaacaatacgtgcgggtcccctttcgctgccattgctgcgggagaaagagcagaaagagcgaaaacagcagccatcgccgccagggtgcttttgaacatgagatttccttaacaaacagagcagaaaaaaagcaagtgaagagattctaaatagccttcaagaacaaggccatccctttacctaattttacgtatctgaaatatatgtaacctgacgatcactttttattccgtgatcaaaatcacctcttaaaatgcaatttagcaaccgattgcaataaaacatttaaacagatcacaaaatcacctaaaatcgcccgctcgcggcatatcccgctatgccattttatttttgaacgcaggccaatcatgactaacagcaatcgcatcaagctcacatggattagctttctctcctacgcactgactggtgcgttggttattgtcaccgggatggtgatgggaaatatcgccgattatttcaatctgcctgtttccagtatgagtaataccttcaccttcctcaacgccggcattttaatctctatcttcctcaacgcctggctgatggaaatcgtcccgttgaaaacgcagttacgttttggctttctcctgatggtgctggcggttgccggtttgatgttcagccacagcctggcgctgttcagcgcggcgatgttcattctcggggtggtcagcggcatcaccatgagcattggtacattcctggtaacacaaatgtatgaagggcgtcagcgcggttcccgcctgttatttaccgactccttcttcagtatggctgggatgattttcccaatgatcgccgcgtttctactggcgcgcagcattgagtggtactgggtttatgcctgcatcgggctggtgtatgtcgctatttttattctgaccttcggctgtgagttcccggcgctgggcaaacatgcgccaaaaacggatgctccggtagagaaagaaaagtgggggatcggcgtactgtttctctctgttgcggcgttgtgctacatcctcggtcagttaggttttatctcctgggtgcctgagtatgccaaaggcctgggcatgagcctgaacgacgcgggcacgctggtgagtaacttctggatgagttacatggtcggcatgtgggcgttcagctttattcttcgcttctttgatttgcaacgcattctgaccgtactggctggtctggctgcgattctgatgtacgtctttaacaccggaacaccagcacatatggcgtggagtattctcgctctgggcttcttctccagcgcgatctataccaccatcatcaccctgggtagtcagcagaccaaagtaccgagcccaaaactggttaactttgtcctgacctgcggaaccatcggtactatgttgacctttgtggttaccggcccgatcgttgaacatagcggtccgcaggcggcactgcttacagcaaacggtctgtacgctgtcgtctttgtgatgtgcttcctgttaggtttcgtcagccgtcaccgtcagcataacaccctgacctctcattaattgctcatgccggacggcactatcgtcgtccggccttttcctctcttcccccgctacgtgcatctatttctataaacccgctcattttgtctattttttgcacaaacatgaaatatcagacaattccgtgacttaagaaaatttatacaaatcagcaatatacccattaaggagtatataaaggtgaatttgatttacatcaataagcggggttgctgaatcgttaaggtaggcggtaatagaaaagaaatcgaggcaaaaatgagcaaagtcagactcgcaattatcggtaacggtatggtcggccatcgctttatcgaagatcttcttgataaatctgatgcggccaactttgatattaccgttttctgtgaagaaccgcgcatcgcttatgaccgcgtacacctcagctcttacttctctcaccacaccgccgaagagctgagcctggtgcgcgaaggcttctacgagaaacacggcatcaaagttctggtcggcgaacgcgctatcaccatcaaccgtcaggagaaggtgattcactccagcgccggacgtaccgttttttatgacaagctgatcatggcaaccggttcctacccgtggatcccgccaatcaaaggttctgatactcaggactgctttgtctatcgcactattgaagacctcaacgccattgaatcctgcgcccgtcgcagcaaacgcggtgccgttgttggtggcggcctgttaggtctggaagccgcaggcgcgctgaaaaacttaggtattgaaacccacgttatcgaatttgcccctatgctgatggcagaacagcttgatcagatgggcggcgagcagctgcgtcgcaaaatcgaaagtatgggcgtgcgcgttcacaccagcaaaaacacccttgagattgtgcaggaaggtgttgaagcgcgtaaaaccatgcgttttgccgacggcagcgaactggaagtcgactttatcgtcttctctaccggtatccgtccgcgcgataagctggcaacccagtgtggtctggacgttgctccgcgtgggggtattgtcattaatgattcctgccagacttccgatccggatatctacgccatcggtgaatgcgcaagctggaacaaccgtgtatttggtctggtagcacctggctacaaaatggcgcaggtcgccgttgaccatattctcggtagcgaaaacgcctttgaaggtgctgaccttagcgccaagctgaaactgctgggcgtagacgtaggcggtattggtgatgcgcacggtcgcacgcctggcgcacgtagctacgtttacctcgacgaaagtaaagagatctacaaacgcctgattgtcagcgaagacaacaaaaccctgctcggtgcggtactggtgggcgataccagcgactacggtaacctgctgcaactggtgctgaacgctatcgaactgccggaaaacccggattccctgatcctgccagcacacagcggtagcggcaagccgtctatcggtgttgataaactgccggacagcgcgcaaatctgctcctgcttcgacgtcaccaaaggtgatctgattgctgccatcaacaaaggctgccacacagttgcggcgctgaaagctgaaaccaaagcgggtactggctgcggtggctgtatcccgctggtcactcaggtactgaacgcggaactggcgaaacagggcatcgaagttaacaacaacctgtgcgaacactttgcttatagccgtcaggaactgttccatttgatccgcgttgaaggcattaaaaccttcgaagaactgctggcgaaacacggcaaaggctacggttgtgaagtttgtaaaccaaccgtcggtagcctgctggcctcctgctggaacgaatacattctgaagccggaacatactccgctgcaggattctaacgacaacttcctcgctaacatccagaaagacggcacctacagcgtgatcccgcgttctccgggcggtgaaatcaccccggaagggctgatggcggtaggtcgtatcgcgcgtgaatttaatctctacaccaagatcactggctcccagcgtctggcgatgtttggcgcacagaaagacgatctgccggagatctggcgtcagctgattgaagccggcttcgaaaccggtcatgcctatgcgaaagcactgcgtatggcgaaaacctgcgtgggtagcacctggtgccgctacggcgttggcgacagcgtcggcctcggcgtggaactggaaaaccgctacaaaggcatccgtacgccgcacaaaatgaagttcggtgtctccggctgtacccgtgaatgtagtgaagctcagggtaaagacgtgggtattatcgccactgaaaaaggctggaacctgtatgtttgcggtaacggcggcatgaaaccgcgtcatgcggatctgctggcggcggatatcgatcgcgaaacgctgatcaaatatctcgaccgcttcatgatgttctacatccgtactgccgacaaactgacgcgtaccgcaccgtggttagaaaacctcgaaggcggcatcgattacctgaaagcagtgatcattgacgacaaactggggctgaacgcacatctggaagaagagatggcgcgcctgcgtgaagcggtactgtgtgagtggactgaaacggtcaatacgccgtctgcgcagactcgcttcaaacacttcatcaacagcgacaagcgtgacccgaacgtgcagatggtgccagagcgcgaacagcaccgtccggcaacgccgtatgaacgtatcccagtaactctggtggaggacaacgcatgagccagtggaaagacatctgcaaaatcgatgacatcctgcctgaaaccggcgtctgcgcgctgttaggtgacgagcaggtcgcgattttccgcccgtatcacagcgatcaggtgtttgcgatcagcaacatcgacccgttcttcgagtccagcgtgctgagtcgcggactgattgcggaacaccagggcgagctgtgggtcgccagcccgctgaaaaaacagcgttttcgcttaagcgacggcttgtgcatggaagacgaacagttttccgtcaaacattacgaagcgcgagtgaaagacggcgtggtgcagctgcgcggttaatgttttaacgggaggcgcaatgcctcccctttttgcatggtcctgtaataatcttcggtatattgcaggacattttttaaactttttgttttattttttgtttttattttttaaaggataatcaaatgtttacagacactattaataagtgtgcggctaacgctgcgcgcattgcacgcctgagcgcaaataacccgctcggcttttgggtcagctccgccatggcgggcgcgtatgtgggtcttgggatcatcctgattttcacgctcggtaatttgctcgatccatccgtacgccctttggtgatgggcgcgacctttggtatcgccttaacgctggtgattatcgccggttctgaactgttcaccggacacaccatgttcctcacctttggggtaaaagcgggcagcatcagccacgggcaaatgtgggcaatcctgccgcaaacctggctgggtaacctggtcggttccgtcttcgttgccatgctctatagctggggcggcggtagcctgctgccggtagataccagcatcgttcactccgtcgcgctggctaaaaccactgcaccggcaatggtactcttcttcaaaggtgcattgtgtaactggctggtttgcctggcaatctggatggcgctgcgcactgaaggggcggcgaaatttatcgctatctggtggtgtctgctggcatttatcgcgtccggctacgagcactctatcgctaacatgacgctgttcgcgctctcctggttcggcaaccacagcgaagcctacacgctggcgggtattggtcataacctgctgtgggtgacgctgggtaatactttaagtggtgccgtattcatgggattgggttattggtatgctacgccgaaagcgaatcgtccggttgcggacaaatttaatcaaactgaaacggctgccggttaattactaaggggtttttacgtggatcatttgcctatattttgccaattacgcgatcgcgactgtctgattgtcggcggtggtgatgtcgcggaacgcaaagcaaggttgctgttagacgcaggcgctcgcttaacggtgaatgcattagcgtttattccacagttcaccgcatgggcagatgcaggcatgttaaccctcgtcgaagggccatttgatgaaagccttctcgacacctgctggctggcgattgcagcgacggatgatgacgcgcttaaccagcgcgtcagcgaagccgctgaagctcgtcgcatcttctgtaacgtggtcgatgcgccgaaagccgccagctttattatgccgagcattattgaccgcagtccgctcatggtagcggtctcctctggcggcacctctccggttctggcacgcctgttgcgcgaaaaacttgaaagtctgctgccgttacatctgggccaggtagcgaaatacgccgggcaattacgcgggcgagtgaaacaacagttcgccacgatgggtgagcgtcgccgtttctgggagaaattgttcgttaacgaccgcctggcgcagagcctggcaaacaacgatcagaaagccattactgaaacgaccgaacagttaatcaacgaaccgctcgaccatcgcggtgaagtggtgctggttggtgcaggtccgggcgatgccgggctgctgacactgaaaggactgcaacaaattcagcaggcagatgtggtggtctacgaccgtctggtttctgacgatattatgaatctggtacgccgcgatgcggaccgtgttttcgtcggcaaacgcgcgggataccactgcgtaccccaggaagagattaaccagatcctgctgcgggaagcgcaaaaaggcaaacgcgtggtgcggctgaaaggtggcgatccgtttatttttggccgtggtggcgaagagctggaaacactgtgcaacgcgggtattccgttcagcgtggttccgggtattaccgcagcttctggttgctctgcctatagcggtattccactcacgcatcgcgattatgcccagagcgtacgcttaattaccggacacttaaaaaccggtggcgagctggactgggaaaacctggcggcagaaaaacagacgctggtgttctatatggggttgaatcaggccgcgactattcagcaaaagctgattgaacacggaatgccaggcgaaatgccggtggcaattgtcgaaaacggtacggcagtcacgcagcgcgtgattgacggtacgctcacacagctgggagaactggcgcagcaaatgaacagtccaagcctaattattattggtcgggttgttggcctgcgcgataaactgaactggttctccaaccattaatttaacccgggccagagaattctggccttcttaatgactctttttatatattcagcaaataaaacatagccccttaataaatattatctgctaatgggttatattcaccgttacagcgacttacaaaattaagtcattcgctcactgacgccaattaaatattcctgtatcgttcttaacgagcagtctgcttatattcatataatcaatgaatattaattaatatataatacatagggaatgtaaatgaacaaatttattaaagttgcactggtaggtgcagtactggctacgttaactgcatgtactggtcatattgaaaaccgtgataagaactgctcttacgactacctgctgcacccggcaatttctatttctaaaatcattggcggttgcggtcctactgcacagtaagtctctgacagaaatcggctaacaccggtttaattgcccgacgccctctggattttccgagggcgtatttgtttctatgtccttcttgcccccgcccgtaaaaatattttcactttaaattcaatttgataactacatccattagccacagcgcgatcctgtgcgaaattttgtgatcttcctccacattacataacatcatatgttgttatattcatcatgcattgtcatgttaccttttaaatgactgcaaactctcccctacaacgtattggacaagaaaaaggtatcgctatgggaagccaggaactccaacgcaagctcggattttgggccgttcttgcaatcgccgtcgggacaaccgtcggctccggtatttttgtatctgtgggtgaagtggcaaaagcagcgggcacgccgtggcttacggtgctcgcgtttgtcattggcgggttaattgtgatcccgcaaatgtgcgtctatgcggaactatccaccgcttatccggaaaatggcgcagattatgtttatctgaaaaatgccggaagccgaccgctggctttcctctccggctgggccagcttctgggccaacgatgcgccgagtttgagcattatggcgctggcgattgtcagcaatcttggctttttaacgcctatcgatccgttgctcggtaaatttatcgccgccggattaattatcgcctttatgttgctacacctgcgctccgttgaaggcggcgcagcgtttcagacgctaattaccatcgccaaaattatcccgttcactatcgtcattggccttgggatcttctggtttaaagcggagaattttgccgcccctaccaccactgcgattggcgcaacgggcagctttatggcgctgctggcggggatctctgccaccagttggagctataccggcatggcctctatctgttatatgaccggcgaaattaaaaaccccggaaaaaccatgccacgagcgctgattggttcctgtctgctggttctggtgctctacaccctgctggcgctggtgatttccggcctgatgcccttcgacaaactcgccaattctgaaacgccgatttccgacgccctgacctggatccccgcactcggcagcaccgctgggatctttgttgccatcacggcgatgatcgtcattcttggtagcctttccagctgcgtgatgtaccagccgcggctggaatacgcgatggcgaaagacaacctgttctttaaatgcttcggccatgtgcatccgaaatacaacacgccggatgtctccatcatcctgcaaggggcgctggggatcttcttcatcttcgtttccgatctcaccagcctgctgggttatttcaccctggtgatgtgtttcaaaaataccctcaccttcggctccatcatctggtgtcgtaaacgcgacgattacaaaccgctgtggcgtactccggctttcgggctgatgaccaccctcgccattgcgagtagcctcattctggtcgccagtacctttgtctgggcaccgattcccggccttatctgcgccgtcatcgttattgctactggtctgcctgcttacgccttctgggcgaagcgtagccgccagctcaacgctttgagctaatgttatctggagaaaataaaatgttggatattgataaaagcaccgtggactttctggtcaccgaaaatatggttcaggaagtggaaaaagttctcagccatgacgttccgctggtgcacgccatcgtggaagagatggtgaagcgcgacattgatcgtatttatttcgttgcctgcggaagcccactcaacgcggcgcaaacggcgaaacatctggcggatcgcttttccgatcttcaggtctacgccatttccggctgggagttctgcgataacaccccgtatcgcctcgacgatcgttgcgcagtaattggcgtttctgactacggtaaaaccgaagaggtaatcaaagcgctggagctgggccgggcctgcggcgcactcactgcggcgttcaccaaacgcgcggatagcccgattaccagcgcggcggaatttagcattgattatcaggccgactgtatctgggaaattcacctgccgctctgctacagcgtggtgctggagatgatcacccgcctcgcgccgaacgcggaaatcggcaagatcaaaaacgatctcaagcagttgccgaatgcgctcggtcatctggtacgcacctgggaagaaaaaggccgccagcttggtgaactggccagccagtggccgatgatttataccgttgctgcgggtccgctgcgtccgctgggttacaaagaaggcattgtaacgctgatggaatttacctggacgcacggctgcgtgattgagagcggagagttccgccatggcccgctggagattgtcgaaccgggcgttccgttcctgttcctgctcggcaatgatgaaagtcgccacaccaccgaacgcgccattaactttgttaaacagcgtactgacaacgtgatcgtcatcgattacgccgaaattagccaagggctgcacccgtggctggcaccgttcctgatgttcgtgccaatggagtggctctgctactacctgtctatttacaaagatcacaacccggatgaacgccgctattacggtggtctggtggaatattaatccctctcccggcccggcaacgggccggatttacgcaaggagttacccgatgaaaacaggtatgtttacctgcggccaccagcggctgcctattgaacacgcatttcgtgatgcaagcgagctgggttacgacggcatcgaaatttggggcggtcgcccgcacgcgttcgcgccggacttaaaagcgggcggcatcaaacaaatcaaggcgctggcgcagacgtatcagatgccgattatcggctatacgccagaaaccaacggctatccgtataacatgatgctgggcgatgaacatatgcgtcgcgaaagcctcgacatgatcaagctggcgatggatatggcaaaagagatgaacgcgggttatacgctgatttccgcggcccacgcgggctatctcacgccacctaatgttatctggggacggctggcagagaacctaagcgaactgtgtgagtacgcggaaaacatcggcatggatctaatcctcgaaccgttaacgccgtatgaaagcaacgtcgtgtgtaatgctaatgatgtgcttcatgcgctggcgctggtgcctagcccgcgcctgttcagcatggtcgacatttgcgcgccgtatgtccaggcggaaccggtgatgagttatttcgacaaactgggcgataaattacgtcatctgcatattgtcgacagcgacggggccagcgacacgcattacattcctggagaaggcaaaatgccgctgcgggaactgatgcgcgatattattgagcggggctatgagggttactgtacggtggagctggtgacgatgtatatgaacgagcccagactctatgcccgccaggcgctggaacgctttcgcgcgctgctgccggaggatgagagatgaaaaccctggcgacaatcggcgataactgcgtcgatatctacccgcaactgaataaagcgttttctggcggtaatgcggtcaatgtggcggtgtactgcactcgctacggcatacagccgggatgcattacctgggtgggtgacgatgactacggcacaaagctgaagcaggatctcgcccgcatgggcgtcgatatcagccatgtccatacgaaacacggcgttaccgcacaaactcaggtggaactgcacgacaatgatcgcgtttttggcgactacaccgaaggcgtgatggccgactttgccctgagtgaagaggattacgcctggctggcgcagtatgacattgtgcacgcggcaatctggggacatgcggaagacgcattcccacagctgcacgctgcgggcaaacttaccgctttcgacttctccgacaagtgggacagcccgctctggcagacactggtgccgcatctcgattttgcctttgcctccgcaccgcaagaagacgaaacgctgcgtctgaagatgaaagcgattgttgcccgtggcgcaggaacagtgattgtcacgctgggtgaaaacggcagcattgcctgggatggcgcgcagttctggcgtcaggctcctgaaccggtgacggttatcgacaccatgggtgccggagatagcttcattgccggattcctttgcggctggtctgcggggatgacattaccgcaggcgatagcgcagggaacggcgtgcgcggcgaaaaccattcagtaccacggtgcctggtaagtataacgttggcgtgagcatcttcacgccaacgtgctgttacttgccggaaaacgaccctataatccgagtaattcattctttatttcagggtcgattatgagtgctacggaccgctactctcatcaactcctctacgctaccgtccgccagcgactgctggatgatatcgcgcagggggtttaccaggcgggcaacagatccctaccgaaaacgagctttgtacacaatataacgtcagccgcattaccattcgcaaagccatcagcgacttagtggcagacggcgtactgatccgctggcagggaaaaggcacctttgtacaaagccagaaagttgaaaacgccctgcttactgtcagtggttttaccgattttggcgtcagtcaaggcaaggcgacgaaagagaaagtgatcgaacaggaacgggtcagcgccgcgccgttttgcgaaaagctgaacatccccggaaacagcgaagtgttccatctctgccgggtgatgtatctcgataaagagccgctgtttattgatagtagttggatcccgctgagccgttatcctgactttgatgagatttacgtcgaaggaagctccacctatcagttatttcaggagcgttttgacacgcgagtggtcagcgacaaaaagaccatcgatatctttgccgccacccgcccgcaggcaaaatggctgaaatgcgaactgggcgaaccgttgtttcgcatcagcaaaatcgcctttgatcagaatgacaaaccggtgcacgtctccgaactcttctgccgcgccaatcgcatcaccttaactattgataataaaagacattaaccgtaggccggataagatgcgccagcatcgcatccggcgatgctggcgcgttgaattttacatcccgtacgttcccctcaccctaaccctctccccaaaggggcgaggggaccgttcagtacggaatttagcttgacggtgctatccagcattaaatactggcaatactctcacgcaaaatccgcagcaccgtctcttcaccgctgcgattcgggttaatgcgaatcgcacaatgttcactttgtggattcgcctggcgaaacgttccggaaaggcgataaaagagcggcgggatttcatatttgctctctgcacccaccgggtaaggcaaggcaccgcgcttttgcgcctcttccagcactctggcggcaatcggctgatgaaactcgacaatcaacaccttgctctgcgcattagcaatcaccgcgcttttcacttccggcaccgcaccaccgttaagcaaagccagcaaccgttcagatacccctgcctgcaccgcgtgcatcactggcgcaaacaccagaccacgcaatacttccagcgcctgtgcgccctggatctggctaccgccggagtaaagcgtggcgcgaatacggttgataacatcagcatcgccgaccactgcaccaacaccctctggcccaaatagcttgaagcaggaaaatgtgctgacattcgcgccgcattcacagccgattcgagccaccttcatcaccgcatagttgtcatcggttaacgctggaacacctgccgcgcgcaacgttgccagcacatctgccagcacgtagctgtcctgcggctgctggcgcgtatgctgcaccagcgccgcatccggttgttgctcgtcgacgacctgcttcagtgcgctcaggtcattgaaatcaacagtaataagcgtcagccccatctgctcaataataacccgtgtcgtcgggtaaacaggcgcgtcatgcaccagaagacgctgccccggtttgagcaaagccgccagcccggcgcgaatcgcgccagtccccgcgtcctgcaccagcgccgcagcctgtgcgtgaaatgcatcagccagcacctgttccacacgctgggtaacgcgcggttgattcagtcctggcgttaagcctaaatcaccgccagtaagaaactcgctgccggggaaatggcgacaaatgctatccaccagcgcaaactgcttttgctgcgcctcaataatcgtcaggctttgcagaggaaacgtcttcataggtgccttccttaagccggaacgaacaggccaagccagtaaagaacattcagcagaataccggtgatcattactgccacgaccggtgccgccattttctgtaccggacggcccagggattcgttgaggaagtaaatggcaaccgcgatagagaatccggtataacccgccatcttaattgctgcgaaaatgctaccgaccagcagcgccacttccatcagcatattcatggcgttacggatgttatcgctcgcattacgcacgctcgggtagcgtcccagccatttgccgatgctacgaagcagcaagacttccgcgctaataaccactgcgcctaataccgctgcaaccatcggattcgggctgagatagtccaccgcataaacaaaggtaaagcccgcaactgcatacacacccgttgctaacgcggtggtggcaatcaacggcacaaaccccagtccgcgcataaattctgccagagccgcctgattaatcagcgtttggctttgttccggcgttacgcctgcggaatatgctttctccagtgtgaagatgctcacttcactgccagcaaaaatcttcatgctggcaacggcggcaatcaatgctcccacgatggcgatatagggtaagtttttgataatccgactcgtgcgttcttcaaacacgctaagcccgctggcatcaatgtcattttcatcacgatgacgcaggtcgtgagttatcgcgatccccagcagcatcaccatgccaataaagatttcgatggattcagggttaagatgtgggaaatagcgcacgactaccacacgggtcatcagtaccaccacggcggcgatcagactttgcttccagccaaactggtagaaaatcgccaccagcgggaacagtgcaaaagcactaaccaccgggctgcttaattcccccaggctacctaatacatccaccggcagcgcggtcagcagctggtttactggcaacaggcaagtaaggatcaacacgccccagatagcgccaagaccaaacgccatcaggctgtttatcgccaggacgccgaggatatcggtaggaagaaagagtaaccatgcgttgagcagcccggttttcagggtaaaagagatccccacgctggccacaaaaccaatgctcagaccaaaagcgatactccccgcctcgcgacggttcatatagccttcaatcagttgcggcaggatcgggcggatgccgtcatgaaaaacagccgcgctgcgatgcgccagaaggcttgtcatacccgtcaggcacgccaccacgataatctgaatatacagatccatagtcgtgccttttatttcagatggttaatcagcatcggaatcgcgtgttcgacgtgctcaacggaaaggccaaacgccacttttccttcagcgatcattttggcgatatgctcgtctttcgctttaatgcctggtttggcaatggtgcaacttttgttatagcctatcaccgcgatggcaatgctcaatgccgcgcccgcaccggtattacacgcgccgatgtaataatccagttgcccggatttcaccttcattgccgcttccatgtcgttgtgaatgaaaacttcaaaacagccaggagccgtcgcttcaatagtttttttaatctgctcacgctgtaagcctgcaacgccaatctttttcatgagtctgtccttattggaaaaattgagagggattttcacgtaacatcacatccacatcggcctgactgaatccactctggcgcaattgcggaataaaggtggttagtaaatagtcatagccataaccaccgttggcttttaaatgggagcggcgcgtaatatccatgctcagcatgacgcggttcagcaacccacggtcgcgtagcgcatgaagcatcgcaatacgcttttcgtccgggtagtaactgttcttgccgatggtgtcgaactgcacgtacgcgccgagatcgatcatcttcaaaatgttgtcgaggttgtctttcagatcgcagtgaccaacggtgacgcggctaagatcaaccccgtgggcttgtagcaacgccagttgctccagccccatcgtgctgaagctcgtatgcgtggagatcgggcgtccggtctggttatgcgccagcgcagcggcaataaataccttctcttccagcggcgtaatctttccttcgctggtgccgatctccgcgatgatcccggctttcagctccgtgccatcgataccctgttcaatttcatcgaccatctcctgcgccagttcctgcacgctgcgggtcgccacatgttccgggaaaaacgcgtcctggtaataaccggtacaggccaccacgttgatccccgtctcgcgcattacatcaagcataaattgcgcattgcgccccatgtaacggttggtcatctcaatcacattacgcacgccccgggtcatcaggtcgttcatctcctggcaaatgaacgcatactgatcaaggcggcagtccacgttgtttttaaagccggagagatcaatatgcagatgctcatgggcgagggtgtaacccgtcggatcaaaactcatagggtgtctcctgcaaaccggagggaggaaagaaaagagcgaccattttgtggcggtggcgcgcggaaaaattcacacacggtagcccccacatcagaaagcgtggtgcgcacaccgagctgcgtagcgatcatcccttgctgataaaccagcactggcaccacttcgcgggtatggtggctgtgaccaatggtcggatcgttgccgtgatccgccatcacgaccaggcaatcatctggctgcatcgcctcaacaagccgggcaaggttacggtcaacgacctgcaaacgttcggcataacgtgcgacgtcttctgcatgaccagcgaggtcggtttcctgaatgttggtgcaaataaacgccgtcggatgggtgttaaattcgttgagggtgatatccataatccgctggctatccaccagattttgccagctcacgccataaggattgttgacgatatctgccaccttacccaccagcacggttggcacgcctgcttcatacagtttttgtggcacctgcactttttcatcgacgccatagcccatatgcacgacctggaaaccgttgtcataagcgccagaacgcggcgcattgataccaataaagcgcccttctttgctttctgcggcatcgagaatgcgttgactgtcggttaacaggccaccaaatgtaatgacccgaccgacctgtacctgctcacgcacgatacgaccaattttgattgcgtcgtcaaaagagatcacagagagattggcggtaatgttatagacctggcctaaatccgcctcgagattatcgccaatcgcaaccgcctgattgacccacagaaattgcagatcatcgccacggcgctccacctgccagccagcggaaactaatgcctgctcaacacggtcaatcacatcgcgaaaaggcatccgcagcggcggtaacgggcgcgtgcctaaaatttcctgatgccccataaaggtatcgccaccttcatgttgcagctctgccacgccccaggttgcggaatcactcggctgcatatcgcctggcgcataacccaatgcgttgattagccccagcgtctccagcgttggtagctgcaaatgcggcaactggctcaggatgtgaccacatgtattcgctcccgcatcttgcggacgcaccagcgtgacatctttcattgcccctacgccaaagctatcaatcactaacaccacaaatcgcgccattacgcccccagagagtttccaagactgtcataacgaccgacgatttccggttcgccacgatgaataccggacaccagcaccacatcgctacgggtgacaaaaatctgcgtgcgaaaacagagcaccactgcactgcttaccggaaactcgcctgccagcggcagggtgtagtcgatactgctgtcatccacagttttgagattggtttcagtaatcttttgattttctggcgtaaacaccaacgcatgttgcgcatgaccacgacgatagtaaccgccgccgtagcagtagctgtcgccacggaaatgatgggagatttcacttaaccagagcatcgcgatacgttcaggctgatcgccctgctggtttgccggaatagtgcccgtcagcgcatgaccgggttcggcatgagtcacaccgtattgcgccagtaatggcaggctagtgcagctggtcgcactaggcgcgttcagttgctcaagtgcaataccagatttcgccagttgatcccgtgcctgtatcagcgtgtgaagattcggtgtcggcaaaacttttccgacagcctcatcccaaagcaggcaagggaaatgggtaagtccggctaaatgcagccctggcagattctggatttcggcgacaatctccggcaacaccttgagggcaaaaccgctctcctggcccggataaagaaaatcatcgtcgctataaactttaagcagcacagactggattcgcccggccttcaccgccgccgcagaaacttcccgcgctttgtcgagagtaaacacggtgatgacgtcggtgccctgttcaacggcgtcagcaacctgatgacaagggatttgtaccagatgcccctgatgcgccacaggcaaaccagcgcggcgcatgactcgcgcctctttgtaatccaccgccacaatgccgctgtagcctaatgccagcaatttttccgccagccacggattacgaccaaactgcttggtcatcagatacagttcaatgccgtaaagccgcgccgtctcaatcagccgcttaccgttttccagtatctgatccacgtcgatcacccagctgtccggggcgatcttgccctgctgccacaggcttagtgcggcggaaatcagcgccgggttctggcgtttcaatgcttctacaaacatcttgttgcctcgtttctgttccttgaattaaatattcatttttttgaatatttaggttgtgcgacgtggatttgtcgggagcttcaaacctcttcgttagcagccatccataatccataaaggttggccagcaaatagccttcttcacacgggttaacttccagtgcgaattccttcaacaacacctgatgcaattgcacaacggcttgccagtggctggattgcgccagttctgccagcaactcgttatccagcggctctatttcttcaccacggcgactgcgcatcagtgcactcgccatatgtgtcatcgccatcgttccttgctcactgcgcaccggcagatggcactctgtttccagtacgttgacgacctgcatcatgcctttgcagatgtccttatcaataacgcctgcctcgcaaagcaggttgagtctggtttccatatcagatgcctttcgtttaataactcggttcctgttccccactcactacccgttgttgatgggcgagcagggcgtgtttatctacaacggcacgcagcagttgttgcattgggtaatcatcgactcgcgtcaggaccacggcttcggtggcctgtaaaaatcgcggatcgtctgtgagcggcgtcgcctctaatcccagcatggtcagttcgttttccgccaccacgttccagatcaccgcatcgacatcgcctttaacaatgcgttgtaaactctcgtgataagagagatcgactcgttccacatcactaccgccaaaaaaaacatcggtcatgattttctgatccgcgctacggttatccagccccacgcgcttcacgtttgcggactcgcctttacggcaaatcaactggtgctcgccaacgtaggtgtgcggccccaactccagcgcgaggcataagcctttttgcgtgagataactttccgccgctagtcggctaaccaccgccatgtcatacacgccattaagcagacactccacgcgaatatccgcgccacgcatgtgcgcatagtaaaaaggaatgccatcaaactgggctttcaatccgctcgccaggccttcgtacaaacgggtatagggcaagggcattgcacataccacgttgttgatatccacatgagtcagcaatgctttgttatccatctcgaccagataactgccattgcgcccacggcgttcaatccgtatcgctccgctactttccagcgttttcaacgcggcctgcgtcaggccaacggaactacggcattcatttgccagctcatctatggttttcaatcgattaccgcacttttcacccaacaaataacgggccagcgtcgtgatgacgacgccttcttttttgataaacgttcgacgcataataaattttcagtaaattgaatatttatatcttcaggaatttgaagataaggcgcaacagcgagatgtggaaacggcgaggcacttcacattttttcggattattgcaaatgaggataaaaaaaccgggtttccccggtttcagagtgatgataaaagcaaaattgcctgatgcgctacgcttatcaggcctacatttccttgcaatatgtgcattactttgtaggccggataaggcgttcacgccgcatccggcatgaacaaagcgcaatttgccagcaatagtgaattacggcttcgccacaaaaccaatcgcttcgtacaccgcttttagcgtacgggaagcgtgcgcgctggctttttccgcgccatctttcatcacctgttgcaggaaggcttcatcgttgcggaaacggtgatagcgttcctgcaattcagtcagcataccggaaacggcatcagccacttcacctttcagatgaccatacatcttgccttcgaactgtttttccagttctgggatgctctggcccgttaccgcactaaggatatccaacaggttggaaacgcccgctttgttctgcacatcgtagcgaactaccggcggctcgtcggagtcagtgaccgcacgtttgattttcttcactacgcttttcgggtcttccagcaggccgataacgttattgcgattatcgtcagacttggacatcttcttggtcggctccagcaggctcattacgcgcgcgccagatttcggaataaacggctccggcaccttaaagatctcgccatacagcgcgttgaaacgctgggcaatatcgcggctcagttcgaggtgctgtttctggtcttcacccaccggtaccagattagtttgatacagcaggatgtccgctgccatcagcaccggatagtcaaacagaccagcgttgatgttctcggcataacgcgcagatttatctttaaactgcgtcatgcgactcagttcgccgaagtaggtatagcagttcagtgcccagcctaactgtgcatgttccggcacgtgggactgaacaaaaatggtgcttttctcaggatcgataccacaagccagatacaaggccagcgtatccagcgtcgctttacgcagcttctgtgcatcctggcgcacggtgatcgcgtgttggtcaacgatacagtaaatgcaatggtagtcatcctgcatgtttacccactgacgcagcgcacccatgtagttaccaatggtcaattcaccactgggctgtgcgccactaaaaacgatgggcttagtcatttttgctttcctgattttcgctatgcggaagccctaatgcgggcagaaggtcatttatagactgataaattacatcaggctggctgagatcgatagcctcgccgtagttatatccgtaggttaagccaacacttgggcaacctgccgcttttgccgcctgaatatcattgcgactgtcgccgacaaacagcatctgttgtggggcaattcccatccgctcagccaccagtaacagcgggtccggatgcggttttttgttttgcacatcatcaccaccaatcaccacgctgaagtatttggcgatatctaaggcttcgagcagcggcgcgacgaacggcgtcggtttgttggtgaccaggcctagcggcaggcctttagcctgcaacgcgcccaacgtatcggcaacgtgcgggaacaaaaacgtcccctcttcggcaacctcgccatagtagcgatcgaacagtttacgcagaatacgtacctgttcttctgccggaatgtcgtcatcaacgggcggtttacccattgttttacgctgagtcgcacgttcctgacgcgcccaggtcaatgcgcgctccatcagaacatctgcgccgttaccaatccaggtaataacgcgttcttcacctgcgacgggcaactccagcgcatacagcgccatatctaccgcagcagcaagaccaggagcactgtcgaccagcgtaccatcaagatcaaaagcgacgccgcgaatatcttcaaacttattcatgacttacctttgccagttcactgcgcatttcatcaatgacttttttgtagtctggctggtcgaagattgcgctaccggcgacgaacatatccgcgcccgccgcagcgatttcgccaatgttgttcaccttcacgccaccgtccacttctagtcgaatgtcaaagccagactcgtcgatacggcgacgtacttcgcgcagtttatccagtgtttgaggaatgaaagactgaccgccgaaaccagggttgacggacatcagcaggatcacatccagcttatccatcacgtaatccagatagctcagaggtgtcgccgggttaaataccagacccgctttacagccattttctttaatcagttgcagcgtgcggtcaacatgctcggaggcttctggatgaaaggtaatgatgctggcaccagcggcagcgaaatcaggcacaatgcgatcgacgggtttcaccatcaggtgtacgtcgataggggcggtaatgccatagttacgcaaggatttcagcaccattggcccaatcgtcagattgggaacatagtggttatccatgacgtcaaaatgcacgacatcagcgccagctgccagggcttttgcggtatcttcacccaggcgggcaaaatcagcgctcagaatactgggggcaatcaaatactgtttcatccgcttctccttgagaattattttttcgcgggactaacgactcctggtttgtacaaagccagcagttcgtccacctttttacgtgtgccgccgttgctgcttatactgcgtcgaactttgacgacatgcaattttgcgcgctgataccactcacgcgttaacatcgtatcgtgattggagatcagcactggaatatggcgctcaaccagaccttcggcgatctccgccagatgcgcttgttgttcaagcgtaaaactgtttgtgtgatacgccgtaaagttggcggtcgcagacagcggtgcataaggcggatcgcaatagacgacggatgcatcatctgcgcgcgccatgctatcggcgtaagactcacaatagaaaaaggcattctgcgctttttcagcgaagtgatacaactctgcttccgggaaatagggttttttgtagcggccgaacggcacgttaaactcaccgcgcagattgtaacgacacaggccgttgtaaccgtagcggttcaaatataaaaacagtaccgcccgacggaacggatcctggcttttgttgaactcttcgcggaactgatagtaaacctcggcgcaatttgtttcgggaacaaacagctcgcgtgcggcctgtacgtactcatcagtacgcatcttcacaatgttatagagactgatcaggtcgctattgatatcggcaaggatataacgagaaaagtcggtgttgagaaacacgctcccggcacctacaaaaggctcaaccagacattcgcccttgggcaaatgccgtttaatatcatcaagcaggggatacttgccccctgcccacttcaaaaaagcgcgatttttcttcatgctgactaactaattacaccttctccggctgtggagaaagctccgacagcatccagcgcttcaggcaactcccgcaacgataaaccattgcgggagataaccttgattacttcagatcggcctgtacctgacgcagcggtttcgcccacgggtttttggcctggacatctgctggcaatgtagataccgcttttttcgcctcttctttgctagcgtacacgccagaaaccaggacataccacggctgaccattacgcgtcgtttcatagacaacgtagtttttcagattctctttcttcgcccaaccgttcaggttgtcgtagttagaggaactgctcagctgcagagtgtaatggctggacggtgcgcttttcaagctaccaacattacctgcggtcttcgccccagcagcgggtgttgctgtggtttgcgccggggatgccgtctgtactggagccgtagtcgccgtctcttttggtgctggcgtagaagtcgcagccggtgccttcgtgctcgccacaggggcagctggttcagtacgcttcggcgtctgtgctaccggcttcggctccgttttcacggttgcttgcggttttttcggttcaatcaccgcctgctgacgagctgggcgcgtagtggacggacgttcagcggtttgcgttttcgccgtgtcacggcttgcattgccattgcgaacaggcgcaaccgttgcgggttcagtcggcaacgtggaattgaccgccacattgttcagctgttgctgattttgtggctgggtcagcgcattgttcaggtcaccctgcacttcaacacgttgttgaccatccgttgccaccggggtttgcccttgagtcggcgtagaagagatcggtggcagagaaacatcctgctgagtattttccgcagacgtggttcccggcgctggctgcacgccattcgcctgatcggtcgcattgccagcaagatcaatactcttctcgccagacgcggtttgatcgctggaagtggtgctgggggcttttagcgcagaaccgataccgatgatcaacagcagtagaaccagaatgccgacgcccatcatcatatactgacgagaagcgggtttactggctgcttttttgcgcttacgcggacgacgctctacgcgctcttcatccacggtttcatcttcggattcgtcaatttcttcttcgatttccggttcctcattgcgctctttttgcgcacgagtcggacggcgatcgtcagtgtcatcaagttcaatatcatcaaaattgatctgcggttcgccacgttcagtacgctcagaacgttcagaagattgacgagaacgaccagtacgacgatcgctgggatcgggtttcagctcgtcttctggtttgaattcatccatttaacaccccactaaaaggttaatgcttaccacgttgcaattaacctgaagctaatagaccgcttgataagcggcctgacctttcttgttgttacgcactttgacaatcggcaatggcgttaagaacaagctcgtggctaacgccgctgcgaacttcactcttaccaattgccaacggaagaattaagcgcatctctcccgcaaggactttcttgtcacgcagcatatgcggtaaatacgcctgcgcggacatttcgcgcggcccattgaccggtaacccagcccgcttgagcagggttataatacgctgcgtttcggcagaactaaactgcccgagacgttcgctcgtccgcgccgccatcaccatacccgcagcgaccgcttcaccatgtaaccaattgccataccccatttcagcttcaatggcatgaccaaaggtgtgtcccagattcagtaaagcacgtaacccggtttcgcgctcgtcggcggcgacaacttctgccttcagttcacaacaacggcgaatacagtacgccattgccggaccgtccagacgcaacaacgcatccagattctcttccagccagttaaaaaacgcaccgtcaagaataatgccgtatttgatgacttctgccagcccgctcgctaactcacgcgggggaagcgttttcagacagtcgagatccaccaccacactagcaggttggtagaacgcgccaatcatgtttttaccgaggggatggttgaccgcagttttgccgccaacggaggaatcgacctggctcagtaacgtcgtcgggacttgaatgaaacggacaccgcgctgataactcgccgccgcgaagccggtcagatcgcccactacgccgccgccaagcgccaccagcgtagtatcgcgaccatgcggtttttgtaacaacgccgtaaagacggtatcgagtacagccaggcttttatactgctcgccgtcagggaggataacgctatcgacgttaacacccgcctgttcaagtacgccgcggaccttatcgagatacagaggagccagggtttcgttggtgaccaacatgacctgctcgccgcttttcagcggtaagaaactagctggttcattaaacaaaccagatgcgatggtaattgggtaactacgttccccgagagtaacgacaatcctctccataacgcgacatccaccttaattactgtacccgcagacgagtgtatataaagccagaattagttgctttccagcatgtgaataatctggtttgcaaccactttagcgctttgatcatcagtacgaatggtcacgtcggcaatctcttcatacagcggattgcgttcattggccaacgcttccagaacttcacgcggcggtgtttcaacgtgcagcaacgggcgttttttatcacgctgcgtgcgtgcaagttgcttttcgatggtcgtttcaagataaacgacaacgccacgagcggaaagacggttacgcgtttcacgggatttcacagagccgccgccagtagccagcacaataccctgtttctcggtcaactcattgatgaccttttcttcgcgatcgcggaagccttcttcgccttctaaatcgaaaacccagcccacatcagctccggttcgtttctcaatctcttgatcggaatcgtaaaattccatattgagttgttgagctaactggcgcccaatagtgctttttccggcacccataggcccaaccagaaagatattgcgtttctctgccattttttcggtactactaagactattcgttaatgataaacccgcttcgctcagagagcgccgcaggacatgaactgaaacctcataagatattgcgagagtcagactgaaaattatctcaatactccagcgggtttggcaactgaataaatcacccatccctctgcatatctggtcgctgcaagcgcgctgccttgctaccaccgctctggcgataaatcaccgggtaagattagcgtaaaaaagacagcaaaatgccgcctgaatgataaatcatcatcatggaacgcaggcagcgaagagcaccaactctcaaatcggtactccttgtatgctaaatacctgcgcgcgtcaaatagatgaaacacgttcagcgtaaaaacattaccgcttttacggctgtttactcactggaaaccagtcgtggcgtgataaacaccactaactcgcgtcgttcatcttcttttccgtcatgacgaaatgattgcccgaaccagggaatgtcgccaagcaacggtacgctatcctgaccgcttttatttttacgggtaaaaatgccgcccagcgccaacgtttctccgcttttgacctcgacctgcgtttcgatctcctgcttatcaatcgccagcacttcgccatcggcctgctgtagcacctgccccggaacgttctggctgatgtgtaatttcagccggatgcgacctttttgtaacaccgtgggcgtgacctccatccccaggacggcctctttaaattccacgctcgtcgcgccactttccccgctggaaacctgatatggaatttcgctcccctgtttaatgctggcaggctgaagatgactggccagcagacgcggactggcgataatatccagctgctgtttttgttcgagcgcggaaagctcaagatccagcaagcgtccgttgatgcgcccaatgttaaaaccgacatgcgttgtcgccgtcgctacggagaggtcgctaccaagcgtggtgacttgcccaacgccaccagcgtgttgcgcatcggccagcgtccatttcacgcctaactcacgcaaacttttttcattaatggtgacaatatgcgcgctcagctcaacctgcccgaccggcagatccatttgcgctacccactgttcaagcgcgcttaacgccgttttgttatctcgtagcaaaaggcgattggtgcgtttatcgacggtcatactccctttggcactcagcagcttctcccccgctttcgccagttctcccgcgtcggcgtattgcagggttatactgcgattttccagcggcagatttgcctgcgcccgcgcctgctccgcctcctggcgggcgatattgttattctgccaggcaatggaatgcacactgagaatgttgccttcctgccgcgttatcagtccggcgcttttcactacagtttgtagtgcctgcttccagggaacatctgttagatgtaagctcaccgtaccgctgacgtctgggctcacgaccaggttcaacttctcctgttcagccagcgcctgcaacacctgagctaccggaacgtcatccaccatcagcgtcactttttgcggctttgccgcctgtacgccgggtatcagcatcaacagtagtgcggctatccattgcttcatttgtatctccttgccgttgccacaaccattgtggcggttcgcagtttgtcccggtacccagcgttagtacgtctggcgtcagctgtaaaattgtccagccgttttccagcacatcgttttgctgcacccgtcgccatttcttttgcccgtcttttattacaccgatgatgcgctcgcctcgccctaccatcccctgatagcgccactggctaagttcgctaatccggcatagatcttccggcggtttaaaagggtcacgcataccggttaaaaggcacaatgcaatacctgccaacaaccagcgtttaaccctcatgcggcgtctccagttgtagcgtgaacaaaagatcatcaccttccacgcttaagctaaaacggctcacgctgacgttgcgctctgccagccgtgtaaatgcgctcggcactgcttcccacagcgttttcaacgccaactcgcctccctgcgcggatggatgccaggaaaccagttgcgcgccggataactgaaaatccagtgggctaaagggcagcgttttttcctcgctgaagggagcggtgtctaccaggcgatacagtgcggcccactgctggtgatgacttgcccgtagtcgaattaatgcgtcgcgctcttcatggtgtgtgctactcagaaaaatgagcgtaactaacatcagcaaccagaatgcccagcaaagctggcggaggcggggacttgtggcgaaccaccagtcaaagaacatgttcatcgctaaccttccttgttaactgatactcaaattgccagcgtccctgcgcatcctgctgcgtggctccccgctgattgagatgaaaagatgcatcctggcggagactcgtttctagtgcgtttaacgcggtaatgcttgttgtcagccccttgatctccagcgttccctgctgccagcttatcgttgtcagccaggcgtgctcgggtaaaagcgccgccagtgcttccagcgcagattgccagtcgcgggtaaattgtcgctggcgctgccgttggctacgctgttcgcgtaactgctgttgctccagcaaacgtggcttcgttatctgtaagctgcgggcgagttgttgttccgcctgaagcaaaactgcgtctatgcgcgcttcggcgctgcctgtcagacgcagtattagcgttatcccgacggccagcagcagaggcgcaacgaacatcagcaaccagaaacgcagaaaagcggtccggcgttgctgtcgccagggcaaaaaattaattggcgggttcatcagtacgccttcccaagcgccagccccagcgcgatggcaaagtctccacctggcggcggtagcggcggctgacgaacagaaacggcctcccagggatcaaatccgccttcgccacatatcgcgacgctttcgggatcaacggataacgctgccgccagctccttcgcgctagtcatccccaccgccagtttgcgcccccagctatagcgcgtcgcccacagccactgttcgttatcacgccaggccagacattgctgatgagaaggtaaaaaaggcaggaatcgctgtaatgcactggcatccggggtgatcgcgctcacatgaacacgcaacctttctgccagagtaagcagcgttgccagctctttgctttgcgcggcagtcacgttataggcgggactgagactgtcttcgctgtaatcgaagcgcagggagtccggatccatatccagctcgcgggccatcgtcccactcagccaggccgtttgctcccgctcaccaagggacatgctcgggcgcggaaaactccgctgtaatgtgcgactggcgggaaacgccaacataatgtgatgacgctgcggcagttcgcgactccacggtaacaacgttttagccagctgctgcgcatcaacaatccgcccatctttgataatgtcgttctccagcggcaaccgccaccagcgttgcaaaaagcattcttttgcgccccgcacgatcgcaaccgctaccgcttcttgctgttgtaaatgcaaaccaatttgccagatcttaaatgccattgtgatgatctccttatcacccgtcactctgacgggtatatcaatgcgtctggcttgcctttatactaccgcgcgtttgtttataaactgcccaaatgaaactaaatgggaaatttccagtgaagttcgtaaagtattttttgatccttgcagtctgttgcattctgctgggagcaggcagcatttatggcctataccgctacatcgagccacaactgccggatgtggcgacattaaaagatgttcgcctgcaaattccgatgcagatttacagcgccgatggcgagctgattgctcaatacggtgagaaacgtcgtattccggttacgttggatcaaatcccaccggagatggtgaaagcctttatcgcgacagaagacagccgcttctacgagcatcacggcgttgacccggtggggatcttccgtgcagcaagcgtggcgctgttctccggtcacgcgagtcaaggggcaagtaccattacccagcagctggcgagaaacttcttcctcagtccagaacgcacgctgatgcgtaagattaaggaagtcttcctcgcgattcgcattgaacagctgctgacgaaagacgagatcctcgagctttatctgaacaagatttaccttggttaccgcgcctatggtgtcggtgctgcggcacaagtctatttcggaaaaacggtcgaccaactgacgctgaacgaaatggcggtgatagccgggctgccgaaagcgccttccaccttcaacccgctctacagcatggatcgtgccgtcgcgcggcgtaacgtcgtgctgagccggatgctggatgaagggtatatcacccaacaacagttcgatcagacacgcactgaggcgattaacgctaactatcacgcgccggagattgctttctctgcgccgtacctgagcgaaatggtgcgccaggagatgtataaccgttatggcgaaagtgcctatgaagacggttatcgcatttacaccaccatcacccgcaaagtgcagcaggccgcgcagcaggcggtacgtaataacgtgctggactacgacatgcgccacggctatcgcggcccggcaaatgtgctgtggaaagtgggcgagagcgcgtgggataacaacaagattaccgatacgctgaaggcgctgccaacctatggtccgctgctgcctgccgcagtcaccagcgccaatcctcagcaagcgacggcgatgctggcggacgggagcaccgtcgcattgagtatggaaggcgttcgctgggcgcgtccttaccgtagcgatactcagcaaggaccgacgccgcgtaaagtgaccgatgttctgcaaacgggtcagcaaatctgggttcgtcaggttggcgatgcatggtggctggcacaagtgccggaagtgaacagcgcgctggtgagcatcaatccgcaaaacggtgccgttatggcgctggtcggtggctttgatttcaatcagagcaagtttaaccgcgccacccaggcactgcgtcaggtgggttccaacatcaaaccgttcctctacaccgcggcgatggataaaggtctgacgctggcaagtatgttgaacgatgtgccaatttctcgctgggatgcaagtgccggttctgactggcagccgaagaacagtccaccgcagtatgctggtccaattcgcttacgtcaggggctgggtcagagcaaaaacgtggtgatggtacgcgcaatgcgggcgatgggcgtcgactacgctgcagaatatctgcaacgcttcggcttcccggcacaaaacattgtccacaccgaaagcctggcgctgggtagtgcgtccttcaccccaatgcaggtggcgcgcggctacgcggtcatggcgaacggcggcttcctggtggacccgtggtttatcagcaaaattgaaaacgatcagggcggcgtgattttcgaagcgaaaccgaaagtagcctgcccggaatgcgatattccggtgatttacggtgatacgcagaaaagcaacgtgctggaaaataacgatgttgaagatgtcgctatctcccgcgagcagcagaatgtttctgtaccaatgccgcagctggagcaggcaaatcaggcgttagtggcgaagactggcgcgcaggagtacgcaccgcacgtcatcaacactccgctggcattcctgattaagagtgctttgaacaccaatatctttggtgagccaggctggcagggtactggctggcgtgcaggtcgtgatttgcagcgtcgcgatatcggcgggaaaaccgggaccactaacagtagcaaagatgcgtggttcagcggttacggtccgggcgttgtgaccagcgtctggattggctttgatgatcaccgtcgtaatctcggtcatacaacggcttccggagcgattaaagatcagatcagtggttacgaaggcggtgccaagagtgcccagcctgcatgggacgcttatatgaaagccgttcttgaaggtgtgccggagcagccgctgacgccgccaccgggtattgtgacggtgaatatcgatcgcagcaccgggcagttagctaatggtggcaacagccgcgaagagtatttcatcgaaggtacgcagccgacacaacaggcagtgcacgaggtgggaacgaccattatcgataatggcgaggcacaggaattgttctgattaaaaaggcgcttcggcgccttttcagtttgctgacaaagtgcacttgtttatgccggatacggcgtgaacgcgttatccggctaacaaaatcgtgaaaactcaataaattgcagaaaccccataagcctgataaacattgtgcatcaggcaaacttcacgcatttacactcgcccctgccctttcaaccattcgcgcacgaggaacagcgcactgacattgcgcgcttcattgaagtcagggtcttccagccaatccatcatatgcgccagcggccagcgcacctgtggtagcggctctggctcatcgccttccagactttccgggtagagatcttgcgctaccacgatattcattttgctggaaaagtaagacggtgccatgctgagcttcttcaaaaaagtcagatcgttcgctccaaatccaacctcttcttttagctcgcggttagcggcttcgtagacgctttcacccggatcaattaatcctttgctaaaacctaattcgtaggattcagttcccactgcgtattcgcggatcaggatcaggtgatcgtccacaatcggcacaatcatcactgcttcccggttggttggacgcattcgttcataaacacgccgcacgccattgctgaactccagatccacgctctcgacggtaaacagtcgggaacgggctacagtttcaacattcagaatggtgggtttttgtaaacttttgctcatcgtgggatctatgctgtgaaatcagcggttattgtgcgatatcggacacgctttcggcaatgtgaattgcatgttatttacatttatgtaacttaataaataatcgtcctcaaatcaaattaaaagtcaataggttgaaataactccaggaatttgctgatattccgccttcagagggtttgctatgatcagcggttactgtgatgtgcttaatgatgctcaagttaaactccacgcttgccgatagccaaccgcagaatcatgtattgtgtccggtgcgactgaccacgcctgacagactaagtaagatggggaaagcatgagcaccattgtgatttttttagctgctttgctggcctgcagtctacttgcgggatggctgataaaagtgcgatccagacggcgtcagctgccctggaccaacgccttcgcggatgcgcaaacgcgtaaactcacacctgaagaacgtagcgccgttgaaaattatcttgagagcctgacgcaggtattacaggtgcctggcccaacgggagccagcgcggcaccgatctctctggcgctgaatgccgaaagcaacaacgtcatgatgctgacacacgctatcacgcgttacggcatctctaccgacgatccgaataaatggcgttactacctcgatagcgtagaagtccacctgccccctttctgggaacagtacatcaacgatgagaataccgttgaactgattcataccgatagcctgccgctggttattagtctcaacggtcatacgctgcaggagtacatgcaggaaactcgcagctatgccttgcaacctgttccgagtacgcaggcgagcattcgcggggaagagagtgagcaaatcgagctactcaatattcgcaaagaaacgcatgaagaatatgcgctgagtcgtccgcgcgggctgcgtgaagcgttgctgatcgtcgcctccttcctgatgttctttttctgcctgattaccccggatgtatttgttccgtggctggcaggcggcgcgttactgctgctgggcgcaggtctgtgggggctattcgcgcccccggcaaaatcctccctgcgggaaattcattgtctgcgcggtacaccccgtcgttggggattgtttggcgaaaacgatcaggaacagatcaacaatattagtctcggtattatcgacctggtctatcccgcacactggcagccatacattgctcaggatctcggtcaacaaaccgatatcgatatctatctcgaccgccatgtagtgcgtcagggacgatatcttagcctgcatgatgaagtaaaaaactttccgttacagcactggctgcgcagtacgattatcgctgcgggcagcctgctggtgctgtttatgctgttattctggatcccgctggatatgccgctgaaattcactctcagttggatgaaaggcgcgcagaccattgaagccactagcgtaaaacaactggctgacgctggcgtgcgggtaggcgatacattgcgtattagcggtacgggaatgtgtaatattcgaacttccggaacctggagcgcgaaaaccaatagtccttttttaccgtttgactgcagccagatcatctggaacgacgcccgcagtttgccattaccagaatctgaactggtcaacaaagcgacggcattgactgaagcagttaatcgccagctgcaccctaaaccggaagatgaatctcgcgtcagtgccagtttacgtagtgcaattcaaaaatccggcatggtattgcttgatgattttggcgacattgtactgaagacagcggatttatgttctgccaaagatgactgtgtgcgactgaaaaatgcgctggtcaatctcggcaacagtaaagactgggacgcgctggtaaaacgcgccaacgccgggaagctcgatggcgtgaatgtgttattacgcccggtgagtgcggaaagcctggataacctggtggcaacctccaccgcgccgtttatcacgcatgaaacggcgcgagcggcacaaagtctaaacagtccggcccccggcggattcctgattgtcagcgacgaaggcagcgattttgttgatcagccctggcctagcgcaagtctttacgactacccgccgcaagaacagtggaacgctttccagaaactggcacaaatgctgatgcatacgccgtttaacgccgagggtatcgtcacaaaaatcttcactgacgccaatggtacgcagcatattggccttcatccgatcccggatcgttccggcctgtggcgctatctcagcaccacattgctgctactgacgatgctgggtagcgccatttacaatggcgtacaggcctggcgtcgttaccagcgtcatcgcactcgcatgatggagattcaggcctattatgaaagctgcctgaacccgcaactgatcacccctagtgaaagccttatcgaataacacgtttgcgcggcaggttatgctaccctgtcgcgcaaattgcttcactctggagatttccctcatgcatatcaacattgcctggcaggacgtagataccgttctgctggatatggacggcacgttgctcgacctcgccttcgataactatttctggcaaaagctggtgcctgaaacatggggcgcgaaaacggggttacgccacaggaagcgatggaatatatgcgccagcaatatcacgacgtacagcatacgctaaactggtactgtcttgattactggagtgagcaactgggtctggatatctgtgcgatgaccaccgagatgggaccgcgtgccgtactgcgtgaagataccattccgtttcttgaggcactgaaagccagcggtaagcagcgaattttgctcaccaatgcgcatccgcacaacctggcggtaaaacttgagcataccggtctggacgcacaccttgatttattactttccacccacacatttggttatccgaaagaggatcagcggttatggcatgcggtggccgaagctacgggtctgaaagctgaaagaacgctgtttattgatgacagcgaagcgattctcgatgctgccgcgcaatttggtattcgttactgcctcggcgtgactaatcctgattccgggattgccgagaaacagtatcaacgccatccgagtctgaatgactaccgccgcctgatccccagcctaatgtgaaggagacgccatgaaagagaaacctgctgttgaggttcgactggataaatggctatgggctgcccgtttttataaaacccgcgcgctggcccgtgaaatgattgaaggcggtaaggtgcattacaacgggcagcgcagcaagccgagcaaaatcgtcgagctgaatgccacgctcactctgcgccagggaaatgacgaacgcacggtgattgtaaaggcgattactgaacagcgtcgccccgccagcgaggcagccttgctgtatgaagagactgcggaaagtgtagagaaacgcgaaaaaatggcgctggcacgtaaacttaatgccttaaccatgccgcacccggaccgacgcccggacaaaaaagagcgccgcgacctgttacgatttaaacacggcgacagtgaataactgtcacctgcaagagagatgattatgccgcaacatgaccaattacatcgctatctgtttgaaaactttgccgtgcgcggcgaactggtaaccgttagcgaaaccctgcaacagatccttgagaaccacgattatccgcagcccgttaaaaacgtgctggcagaactgctggttgcgaccagcctgttaaccgctacgctgaagtttgatggtgatatcaccgtacagctgcagggcgacggtccgatgaatctggcggttattaacggtaacaataaccagcagatgcgcggtgtggcgcgcgtgcagggcgaaattccagaaaatgccgacctgaaaacgctggtcggcaatggttacgtggtgatcaccattaccccgagcgaaggcgaacgctatcagggcgtagttggtctggaaggtgataccctggcggcctgcctggaagattactttatgcgttctgaacagctgccgacgcgcctgtttattcgcaccggcgacgtagacggcaaaccggctgcaggcggtatgttgttgcaggtaatgcctgcgcaaaatgcccagcaggacgactttgaccacctggcgacgctaaccgaaaccatcaaaaccgaagaactgctgaccttaccggcaaacgaagtgttgtggcgtttgtatcacgaagaagaggtgacggtttacgatccgcaggatgtggagttcaaatgcacctgcagccgtgaacgttgcgccgatgcgctgaaaacgctgcctgatgaagaagttgatagcatcctggcggaagatggcgaaattgacatgcattgtgattactgcggtaaccactatctgttcaatgcgatggatattgctgaaatccgcaacaacgcgtctccggcagatccgcaagttcattaatgagtatgtccggcagagagggctctgccggattttacgactaatacacctgatgcgctttgtcactcattcagattcacattcagcctttcaccatccactacaagatcgcgccacgctttaggcttcgtccccagttttccatccttcgcagctgtgagtaatttttctttcgttatttcgttcggaagtaaactcatatcaagcgcgtcccattcttttctgtcactgtcaaagccatagacaatgactctgtcatcattaaaagcaaacaggatccgctccgcctgaccatcactattcagatcttgctcgaccaggacgcaggcgtctttttcaatacaggtcatcacgttatagcgatcctggattaaggcgctccagaatgtcgcatcaggtttaacagaaccaggggcaattaacacattatcggctaatactttttcgcttacctgttgctgaagatgttgctctccatctaacgccatcagcagatcccgcgcgcgtttcgggtctttcataaacccggcatcgcttttcaggctctcaagcgcagcacgtccatagcgaccgctctgctcgagcatgtagatagttacctggtcactcgtgtttttgccgctctgataacgcgccatatggctgttcacgctaatgcgcatactgtccagcaccgggctattaagaagcaccagtatcaccaacaccaataagctaaccgcaaggttcactttgccctgaagaacaacgggattttgccctttacgccagacgatgctgacaaaataccccaggctccacaccagtaacaccagcaccgccagcacgccctgcaagcggtcgacagtccagccgtactgagcgacccgcagccataacgcccaggcggcgacgaacacatacagcggagcaaccagcaaagcggttttaatcaggcaacgcaacggccctgtccagggaagactcgctttttgcggatcgcggacaatagccattaagatcaattgcaaaaaggccagcgtcaacagcaacccggcggcggagatgtggcgagaaatcgcgctcaggcccgtaaacggcagggtgatgataaacatcagggttagcaaacttactaacggcagcaaccccgtggcgattaacgtgaacaacttttgaatagagtcgattaaacgactctgtgttcgcgcgaggatcaccgccagcgcggtaaccagacctaacgtgagataaataaaccagtcggttgcaaaaaagagcgtattgaaaaacgtgatgccaacaagtttaaacaactcactccacagtaaaagcaccagccacgtcaagccattggcgagaaaaatcaccagtaatataagtacgttatgccatacactctggtaaaaatagcgatagcggctactgtcattgcggatgcgaaggctttgttgtatccacggtagcaacaacattgccatcaacagcagatagcaaccaaaatcccaaagcgccttttcagctctccaggggttcatgccatcagtttgccacttcagccagccgctcatccccagcgtggcaataaacactagcgccagccatccccaaaggcgcttctgtttaaaagagatcacggagaagagtaaaacggaactaaacgcgacggtcgcaggcacgccataaacaatccaactgtgattttttccggaaagccaggcgatcagcaggtagcaaaccagaccctgaagtaatccggtagcaatcatcccccagcgtgttgcgggactaagttcaacgttatccatgttggttatccagaatcaaaaggtgggttaattatcgcatccgggcagtagtattttgcttttttcagaaaataatcaaaaaaagttagcgtggtgaatcgatactttaccggttgaatttgcatcaatttcattcaggaatgcgattccactcacaatattcccgccatataaaccaagatttaaccttttgagaacattttccacacctaaaatgctatttctgcgataatagcaaccgtttcgtgacaggaatcacggagttttttgtcaaatatgaatttctccagatacgtaaatctatgagccttgtcgcggttaacacccccaaaaagactttactattcaggcaatacatattggctaaggagcagtgaaatgcgcgttaacaatggtttgaccccgcaagaactcgaggcttatggtatcagtgacgtacatgatatcgtttacaacccaagctacgacctgctgtatcaggaagagctcgatccgagcctgacaggttatgagcgcggggtgttaactaatctgggtgccgttgccgtcgataccgggatcttcaccggtcgtagtccaaaagataagtatatcgtccgtgacgataccactcgcgatactttctggtgggcagacaaaggcaaaggtaagaacgacaacaaacctctctctccggaaacctggcagcatctgaaaggcctggtgaccaggcagctttccggcaaacgtctgttcgttgtcgacgctttctgtggtgcgaacccggatactcgtctttccgtccgtttcatcaccgaagtggcctggcaggcgcattttgtcaaaaacatgtttattcgcccgagcgatgaagaactggcaggtttcaaaccagactttatcgttatgaacggcgcgaagtgcactaacccgcagtggaaagaacagggtctcaactccgaaaacttcgtggcgtttaacctgaccgagcgcatgcagctgattggcggcacctggtacggcggcgaaatgaagaaagggatgttcagcatgatgaactacctgctgccgctgaaaggtatcgcttctatgcactgctccgccaacgttggtgagaaaggcgatgttgcggtgttcttcggcctttccggcaccggtaaaaccaccctttccaccgacccgaaacgtcgcctgattggcgatgacgaacacggctgggacgatgacggcgtgtttaacttcgaaggcggctgctacgcaaaaactatcaagctgagcaaagaagcggaacctgaaatctacaacgctatccgtcgtgatgcgttgctggaaaacgtcaccgtgcgtgaagatggcactatcgactttgatgatggtagtaaaaccgagaacacccgcgtttcttatccgatctatcacatcgataacattgttaagccggtttccaaagcgggccacgcgactaaggttatcttcctgactgctgatgctttcggcgtgttgccgccggtttctcgcctgactgccgatcaaacccagtatcacttcctctctggcttcaccgccaaactggccggtactgagcgtggcatcaccgaaccgacgccaaccttctccgcttgcttcggcgcggcattcctgagcctgcacccgactcagtacgcagaagtgctggtgaaacgtatgcaggcggcgggcgcgcaggcttatctggttaacactggctggaacggcactggcaaacgtatcagcattaaagatacccgcgccattatcgacgccatcctcaacggtagcctggataatgcagaaaccttcactctgccgatgtttaacctggcgatcccaaccgaactgccgggcgtagacacgaagattctcgatccgcgtaacacctacgcttctccggaacagtggcaggaaaaagccgaaaccctggcgaaactgtttatcgacaacttcgataaatacaccgacacccctgcgggtgccgcgctggtagcggctggtccgaaactgtaatgatttgaagctggagaatatctatccagtatcttatagaaagcaaaacgggaggcaccttcgcctcccgtttatttacccttcttttgtcgtgccctgcgcccgcgttaccggcactggcagccaggcgcgaatggaaagcccgccccgctcgctggtgccaagctccagcatcccgttatggttatccacgatacgctgcacaattgccagccctaatcccgtgccgctaatggtgcgcgcactgtcgccgcggacaaacggctggaacaggtgcttacgttgttccggcgcaattcccggaccgtcatcttccacctggaaccaggcgcgattcggctccgttccgctgctgactttgatccagccattgccataacgggcggcgttgaccaccatattcgccaccgcgcgtttgatgctcagcgggtgcattttcacttcaatgctgccggggtaaagcgcggtttcaatttcccgctcatagccactttcggcagcaatcacctcaccgagtactgcattaagatccgccatttccatcggcatctcctgcccggtgcgcaggtagtcgataaactgctcaatgatggcgttgcactcttcgatatctttattgatgctttctgccagatagccatcctgctcgctcatcatctcagtcgccaggcgaatacgcgtcagcggcgtgcgcaagtcgtgacttacccccgccatcagcagcgtgcggtcatccgccagttgcttaacaccagccgccatatggttaaaggcacgggtaacggaacgcacctcgctagcgccatactcacgcagcggcggcggaataatccctttaccaacctgcaaggctgcgtgttcgagatcgaccaacggtcggttctggatacgaataaacagccacgccccgcctatcgccaatagcataatcgccagcgtatagcggaacagcggagagaaatcgccctgatgaatttcggtcagcggcacgcgtacccagatattggggctcagccaggttttcagccagacgacagggctacttttgttgacctcaacgcgcacttccgtcgggccgcccagttgctgcgccatctgatggcttaagaattcatagtgttgcgcccaacgcagacctgcctcttcggcagcctcgttggagtagagagagatccccagctcacggtagatctcccgacggaaagcgggaggcacaaccaactgcgtgccgtcctccagttgcagtttgtcggtcatcaacatacgcacttcgtacgcgaggactttattaaactgctggaggctcggcaaaatcgcgaagttcagcaccaccagataagtcgtcaccaggctggcgaacagcaaggtgacgatgagcaataacgtacgggcaaaactacttcgtgggctgaagcgcaatcgcctcatgctttagagccgtccggtacaaagacgtagcccagaccccagacggtctgaatgtaacgcggatgcgctggatcttcttccaccatgcggcgcagacggctaatctgcacgtcgatggagcgttccattgcggaatattcacgaccacgggcaaggttcatcagcttatcgcgggagagcggctcacgcggatggctgaccagtgccttcagtaccgcaaactcaccgctggtgagcggcatcggctcgtcttcgcggaacatttcgcgcgtaccgaggttaagtttgaacttaccgaaagcaattaccgcctcttcctgactcggtgcgcctggcagttcgttcgcctgacgacgcagcaccgcacggatacgggccagcagttcacgcgggttaaacggttttggaatgtagtcgtcagcgccaatctccaggcctacgatacggtccacttcttcccctttcgccgtcaccataatgatcggcatcgggttgctctgactacgaagacgtcggcaaatgctcaagccatcttcaccaggtaacattaaatccagtaccataagatggaaagattcacgagtcagcaggcgatccatctgttctgcattagcgacgcttcgaacctggaagccttgttcggtgagataacgttccagcagcgcacgcaggcgcatgtcgtcatcgaccaccagaatcttgtagttctcttgcattgtttgtactcccaaaggttcgcaacaatttgtaagcgtgtattcttaaaaaagctcacgttcgtcaccagctaaatctggtatgaatttcagcctaaattgttacaaagcatattaaacagcagcttaagtatacaatttattcggcgaaacattattgattctgttgatatgatcacgttatacccaatgtgcgcattatcaaacagacaaagggaatcaacgagatgaaaacgcccctggttacccgggaagggtatgaaaaactcaaacaagagcttaattatctctggcgtgaagaacgcccggaggtcacaaaaaaggtgacctgggccgcaagtctgggcgaccgcagcgaaaatgctgactatcagtataataaaaagcgtctgcgtgaaatcgaccgtcgcgtgcgctatctcactaaatgcctggaaaatctcaaaatcgtcgattactcccctcagcaggaaggcaaagtcttttttggcgcgtgggtggagattgaaaacgacgatggcgtgactcaccgtttccgtattgtcggctacgatgaaatttttggccgtaaagattacatctctatcgattccccgatggcccgcgcattgctgaaaaaagaagtcggcgatctggcggtggtgaatacccctgccggggaagcgagctggtatgttaatgctatcgagtacgtgaaaccgtaaggaagagtcttaacctcctgccgatggctggcatttttgccagccagtccgtataactatcccctgatttttgatccgaaaagatgaactcaaaccatgatgaatgatagcttctgccgcattattgcgggtgaaattcaggcgcgcccggaacaggttgacgctgccgttcgcctgcttgacgaagggaataccgtgccgtttatcgcacgttatcgtaaggaaatcaccggcggtctggatgacacgcagctgcgtaatctggaaacgcgtctgagctatctgcgcgagctggaagagagacgtcaggcgatcctcaagtccatttccgagcaaggcaaactcaccgatgatctggcgaaggccatcaacgccaccctaagcaaaaccgaactcgaagacctctacctgccctacaaacctaaacgccgcacccgcgggcaaatcgccattgaagcagggcttgagccgttggctgacctgctgtggagcgatccgagtcacacgccagaagtcgccgctgcacaatatgtttatgccgataaaggcgtggcagataccaaagccgcgctggatggcgcgcgctatatcctgatggaacggtttgccgaagatgccgcgctgctggcgaaagtgcgtgattatctgtggaagaacgcgcatttggtttctacggtggtgagcggtaaagaagaggaaggggcgaaattccgcgactatttcgatcatcacgaaccgttgtccacggtgccttctcaccgcgcgctggcgatgttccgtgggcgtaacgaaggcgtacttcagcttagcctgaatgccgatccacagttcgatgagccgcccaaagagagctattgcgagcaaatcatcatggatcaccttggcctgcgcctgaacaatgccccggcggatagctggcgcaaaggcgtggtgagctggacgtggcgcatcaaggtgctgatgcatctggaaaccgaactgatgggcaccgtgcgcgaacgtgcggaagatgaagcaatcaacgtctttgcccgtaacctgcacgatctgctgatggcggcccctgccggactgcgtgcaacgatgggcctcgatccgggtctgcgtactggggtaaaagtggcggtggtcgatgccactggcaaactggtggcgaccgacaccatttacccgcacaccggacaggccgcaaaagcagcgatgaccgttgctgcgctgtgtgaaaaacataacgttgaactggtagcgatcggtaacggtacagcttcccgcgaaactgagcgtttctatctcgatgtgcagaagcagttcccgaaagtgaccgcgcagaaagtaatcgtcagcgaagcaggcgcgagcgtttacagcgcttccgagctggctgcacaggagttcccggatctcgacgttagcctgcgtggcgcggtgtctatcgcccgccgtttgcaggatccgctggcggagctggtgaaaatcgatccgaaatctatcggcgtaggtcagtatcagcatgacgtcagccagacgcaactggcccgcaaactggacgcagtagtagaagactgcgtaaacgccgttggcgtcgatctcaacactgcttctgttccgctgttaacccgcgtggcgggcctgacgcgcatgatggcgcaaaacatcgttgcctggcgcgatgagaacggtcagttccagaaccgtcagcaactgttaaaagtgagccgtctggggccgaaagccttcgagcagtgcgcgggcttcttgcgcattaaccacggtgataacccgctggacgcgtctaccgttcacccggaagcctatccggtggtggaacgcattctggcagcaacacagcaggcactgaaagatctgatgggtaacagcagcgaactgcgtaacctgaaagcgtctgactttactgatgagaaattcggtgtgccgacggtaaccgacatcatcaaagagctggaaaaaccgggtcgcgatccgcgtccggaatttaaaaccgctcagtttgccgatggcgtcgagacaatgaacgacctgcaaccgggtatgatcctcgaaggcgcagtgaccaacgtcaccaactttggcgcgtttgtcgatattggcgtgcatcaggacggcctggttcacatctctagtttgagcaacaagtttgtggaagatccgcataccgtggtgaaagcgggcgacattgtgaaggtgaaagtgctggaagtggatcttcagcgtaaacgtatcgccctgactatgcgcctggatgagcagcctggcgaaaccaacgctcgtcgcggcggcggtaatgaacgcccgcaaaacaaccgcccggcagccaaaccacgcggtcgtgaagcgcagcctgccggtaatagcgcgatgatggatgcgctggcggcggcaatgggcaaaaaacgttaaacgcccgtactggcctacggttcgaatttgcacgaaatcgtagggcagataaggcgttcacgccgcatctggcaacgaacgccttgcctgacataaaagtgccggagaatatctccggcatttttattccacagccaaactcataatatattccggcaatatttatcatttcattaacaactgaaaccttaattaaacattagccagtccgggtaattcactattcgaattatattttcgctgcgatataaccttgagccacatcaacattgagtcagattattattcaaaccaacattcgcacacattttaagtattgctgatagaaaccattctcattatcattgtgttgttgattatttaatctctcctttgttggcaaatcatctggtctcatgtcgctgtcaaacgccccatgaggtagttatccagttaatgagaaacaagtaggcacctatgcaatacactccagatactgcgtggaaaatcactggcttttcccgtgaaatcagcccggcatatcgccaaaaactgctttctcttggcatgttacctggctcctcttttaatgtggtgcgcgtcgctccactcggcgaccccattcatatcgaaacccgtcgtgtgagcctggtattacgcaaaaaagatctggccttattagaagtggaagcggtttcctgttaatacggtgataacaacaatgaaaaaattaaccattggcttaattggtaatccaaattctggcaagacaacgttatttaaccagctcactggcagtcgtcagcgtgtaggtaactgggctggcgttaccgtcgaacgtaaagaagggcaattctccaccaccgatcatcaggtcacgctggtggacctgcccggcacctattctctgaccaccatcagtagccagaccagcctcgatgagcaaatcgcctgtcactacattttgagtggcgacgccgacctgctgattaacgtggtggatgcgtctaaccttgagcgtaacctgtacctgacgctacaactgctggaactcggcattccctgcattgtggcactgaacatgctcgacattgccgagaagcaaaatattcgtattgaaattgatgctctgagcgcgcgtctgggctgtccggtgatcccgctggttagtacccgtggtcgcggtattgaagcgctcaagctggcgattgatcgctataaagctaacgagaatgtggaactggtgcattacgcacagccgctgctcaacgaagcagatagtctggcaaaagtgatgccttccgacatcccgctgaaacaacgtcgctggctgggcctgcaaatgctggaaggcgatatctacagccgcgcctacgccggtgaagcgagccagcatctggatgccgccctcgcccgtctgcgtaatgagatggacgatccggcgctgcacattgccgatgcgcgttaccagtgcattgctgccatctgtgatgtggtaagcaacaccctgacggcagaacccagccgtttcaccactgcggtagataaaatcgtgctcaaccgtttcctcggtctgccgattttcctctttgtgatgtacctgatgttcctgctggctatcaacatcggcggggcgttacagccgctgtttgacgtcggctccgtggcgctatttgtgcatggtattcaatggattggctacacgctccacttcccggactggctgactatcttcctcgcccagggcctgggtggcggcattaacaccgtgctgccactggtgccgcagattggcatgatgtacctgttcctctccttccttgaggactccgggtatatggcgcgtgcggcgtttgtgatggaccgtctgatgcaggcgctgggcttgccggggaaatcctttgtgccgctgatcgtcggtttcggttgtaacgtaccgagcgtaatgggtgcacgtacgcttgatgcaccgcgtgaacgtctgatgaccatcatgatggcaccgtttatgtcctgcggcgcgcgtctggctatcttcgcagtattcgcggctgccttcttcgggcagaacggtgcgctggcggtcttcagcctgtatatgctgggtattgtgatggcggtgctgactggcctgatgctcaagtacaccatcatgcgcggtgaagcgacgccgtttgtcatggagttgccggtctatcatgtaccacacgttaaaagcctgattatccagacctggcagcgtctgaaaggcttcgttctgcgtgctggtaaagtgatcatcatcgtcagcattttcctgagcgctttcaacagcttcagcctgagcgggaaaatcgtcgataacatcaacgacagcgcgctggcgtccgtcagccgggtgatcaccccggtcttcaagccaattggcgtgcatgaagataactggcaggcaacggttggcctgtttacaggtgccatggcgaaagaagtggtagtgggtacgctcaacaccctctacaccgcagaaaatattcaggacgaagagttcaatccggcagaatttaacctcggtgaagagctgttcagtgcgatagatgaaacctggcagagcctgaaagacaccttcagccttagcgtactgatgaaccccattgaagccagcaaaggcgacggcgaaatgggtaccggggcgatgggcgtgatggatcagaaattcggtagcgcagcagcagcttacagctacctgattttcgtcctgctgtatgtaccatgtatcagcgtgatgggggctatcgcccgtgaaagtagccgtggctggatgggcttctccatcctgtgggggctgaatatcgcttacagtctggcaacattgttctatcaggtcgccagctacagtcagcatccaacttacagcctggtgtgcattctggcggttatcctgtttaacatcgtggttatcggtctgctgcgccgcgcgcgtagccgggtggatatcgaactactggcaacccgcaagagcgtaagcagttgctgcgcagccagcaccaccggtgattgccattaatggctagtcttattcaggtgcgcgatttgctggcgttacggggccgtatggaagcggcccagataagccagacattgaacactccacagccaatgattaacgccatgctgcaacaactggaaagtatgggcaaagccgtgcggattcaggaagaacctgacggctgcctctctggcagttgtaaaagctgcccggaaggaaaagcctgtctgcgcgagtggtgggcgctgcgttaaccttactccatcgcctgttttggaaagcccggtatgcgtctgcatccgggcttttttgcgtgcggctttccataaaaatgcaactcttgcagcacggcgtaagttcctttgaaagcatctcgcagggatgaaaactcgctaatacacaggtgtggagtggcgcgtagagtcgcggcattcaaacaacaggtgaaggaacgccatgagcaaaaagcagagttccaccccacacgatgcgctgttcaaactctttttacgccaaccggacacggctcgtgattttcttgcgtttcatttaccggcacccattcacgcgctttgtgatatgaaaaccctcaagctggagagcagcagctttattgatgacgatctgcgtgaaagctattccgatgtgctgtggagcgtgaaaacggaacaaggaccaggatacatctattgtctgattgaacatcaaagcaccagtaacaaactgatcgcatttcgcatgatgcgttacgctattgccgcaatgcaaaatcaccttgatgctggatacaaaacgttgccgatggtggtgccattgttgttttaccacggtattgaaagcccctatccctatagcctgtgttggctggattgtttcgccgatcccaaactggcaaggcagctttatgcctccgcatttccgctgattgatgtcaccgtcatgcctgatgatgaaatcatgcagcaccgacgtatggcgctgctggagttaattcaaaaacatattcgtcaacgcgacctgatggggctggtagagcaaatggcctgcttattaagtagtggatacgctaatgacagacaaatcaaagggctgtttaattacatactgcaaactggcgacgctgtacgttttaacgattttatcgacggcgttgccgaacgtagtccgaaacacaaggagagtttaatgactattgcggaaagattgcggcaggagggggaacaatccaaagccctgcatatagccaaaataatgcttgaatccggagttcctcttgcagacatcatgcgctttaccgggctgagtgaagaagagttggctgcggcgagtcagtaaagttctgtctcgccatttcaaaagccacttacaccctctgcttcaacgccaccagcaggtgacaaaactcggccggatggctaataaatggcgcatgggccgctttggcgaagatataactttcgctgtgaggccaaagtttatccagcatcggcaccactttgcgcggcaccagaccgtcgagatagccatacaatcgcaaaaacggcatggacacgttttgcagcggctgacggagatcgaccgttttcaggatttccagcccgccattaagcacgtcaacctccggcatcggtaacgccagaacggttttcttcaacgcccgcgcatcctggcgcgccgtttcagtccccatggtttgtaacgccaggaaccgctccactgtacgctgaaaatcatcactgagttgctgctgaaatcccgccagcacgtccggttttatccccggccactcgtcacgagcactaaaacaaggactgctcgccacggtgaccagcgcctgaacacgctcgggatgggttaacgcaatctggcttgccaccagcccgcccagactccagcctaaccaaatggctttatcaggtgcctgttgcagcacggcttcggccatatcagcaagactcagcgcaccaaatccccggctacgcccgaagccgggcaggtcaacaaggtgcagcgtaaaatggctgctaagttcctcgtcaatgcaacgccacacttcggcattcagtccccatccgtgcagcagcacaagatgaacattcccctgacctttggtctgccaccagatgttattcatccgctattgttctcttttgacttacaaggatgaacatatgctaacagtaccgggattatgctggctatgccgaatgccactggcgttaggtcattgggggatttgtagcgtctgtagtcgcgccacccgcacagataaaacgttatgcccacaatgtggattacccgccacacactcccatcttccctgcggtcgctgcctgcaaaaaccgccgccctggcaaagactggtcacggttgccgactatgcgccgccgttaagtccgcttatccaccagcttaaattttcccggcgcagtgaaatcgccagcgccctgagtcgtctgttactattggaagtcttacacgctcgtcgcaccaccgggttgcaattgccggatcgcatcgtcagcgttccgttatggcagcggcgtcactggcgtcggggatttaatcagagcgatttgctgtgtcagccgttaagtcgctggttgcactgccaatgggatagcgaagccgtcacacgtacacgggccactgcgacccagcattttctcagtgcccggctgcgcaagcgcaacctgaaaaatgcctttcgtcttgaattgcccgtgcaaggtcgccatatggtgattgtggatgatgtcgttaccaccggaagtaccgtcgcagagattgcgcagttgcttttacgcaatggtgcggcggctgtccaggtctggtgcctttgtcgaaccttgtaaagcctcgatgatgggcgtattataaccaactaaaatagtcaactattaggccattactatgatccgtatttccgatgctgcacaagcgcactttgccaaactgctggcaaatcaggaagaagggacacaaatccgcgtatttgtgattaaccctggcacgcctaacgctgaatgtggcgtttcttattgtccgccggacgctgtggaagccaccgacacagccctgaaatttgacctgctgaccgcgtatgttgatgagttaagcgcaccatacctggaagatgcagagatcgattttgttaccgaccagttgggttcccagttaacgctgaaagccccgaacgccaaaatgcgtaaagtggcagacgatgcaccgctgatggagcgcgtggagtatatgctgcagagccagatcaacccacagcttgctggtcacggtggtcgcgttagcctgatggaaatcaccgaagacggttacgccattctgcaatttggcggtggctgtaacggttgttccatggtcgatgtgacgctgaaagaagggatcgagaagcagctgctgaacgaattcccggagctgaaaggtgtgcgcgatctcaccgaacaccagcgcggcgaacactcctactactaagttatcccctcttttgtagattgcccgatgcgacgctaaagcgtcatttcgggcctacgttgaacatgtgccagacgttggcgcagcattgctttgtcaaatcctcggttcgtttccccgcgataatatgaccaacctctcataatttaaatttaccccgctctggtgattctcaaacgccagatgttacccgtatcattcacatgggtaccaaacatactcctgacatctgactacaataattagttttagtgggtatcagtcgtggtgccgcaatatctctgttcccgattgggataattagagtttgtcgtcagaaaattgacgttacccataacaaatgaaaggccaggtaaatcatgccattagtcattgttgctatcggtgtaatcttgttgttgctcctgatgatccgcttcaaaatgaacggcttcatcgctctcgtcctcgtggcgcttgctgttggattaatgcaaggaatgccgctggataaagttattggctccatcaaagccggtgtcggcgggacgctcggtagccttgccctgatcatgggttttggcgcaatgctgggcaaaatgctggcagactgcggtggcgcacaacgtatcgccaccacgctgattgccaaatttggtaaaaaacacatccagtgggcggtggtactgaccggttttaccgttggttttgccctgttctatgaagtgggctttgtgctgatgctgccgctggtgtttaccatcgcggcttctgcgaatattccactgctgtatgttggtgtaccaatggcggctgcactgtctgtgacccacggcttcctgccaccgcatccgggtccgactgcgattgccaccattttcaatgccgatatgggtaaaaccctgctgtacggtactattctggcaatcccgaccgtgattctcgccggtccggtttacgctcgcgtgttgaaaggtatcgataagccaattccggaaggtctctacagcgcgaaaaccttcagcgaagaagagatgccgagctttggcgtcagcgtctggacctctctggtgccggtagtactgatggcgatgcgtgcgattgccgaaatgatcctgccgaaaggtcacgctttcctgccggtagcggagttcctcggtgacccggtaatggcaacgctgattgccgtgctgattgcgatgttcacctttggtctaaaccgtggtcgtagtatggatcagattaacgacacgctggtttcttccatcaaaatcattgcgatgatgctgttgatcatcggtggtggcggtgcgttcaagcaggtgctggtagacagcggcgtggacaaatacattgcttccatgatgcacgaaaccaacatttctccgctgctgatggcctggagcattgctgccgtactgcgtatcgcgctgggttccgcaaccgttgcggcaatcactgcgggtggtatcgcggcaccgctgattgcaacgacgggtgttagcccggagctgatggttattgcggttggttccggtagtgtgattttctctcatgtgaacgatccgggcttctggctgttcaaagagtactttaacctgactatcggcgagaccatcaaatcctggagcatgctggaaaccattatcagcgtgtgcggtctggtaggctgtctgctgctgaatatggtgatttgataacactgactgccggatgcggcgtgaccgccttatccggcctacgattcgggatgaattagtaggccggataagacgcgtcaagcatcgcatccggcatcaaccgcactttacttcttcttcgctgcagctctgcgccgtctgtccaaatccttcagcaacttgttcacgccatcatcggcaaacatgctctcaagcgttgcggaaagcttgcgtcgccagtttttatactggtaactggtgccaggaatattcaccggttcggccatatccagccagtcttccggctgtagtcctaacagagcactgttactgtcggcaatgtagcgctgcaaaccacggttcagcgtcggcgtcatgctcatcaagcttgccttatgcccggcacgtttcggcagacaaccatatttatgcagtgcatccagcagcccttgcttcgccagttcgcgatcctgatacagaccgcgcagtaccacttcatccggatacagccccagggttttgcccagcgttagatccccgcactcccagtaaccgcgcagcgttggcaggtcatgtgtcgccgcaaccgccatgctctgctccggatacgctttcggtgcacggaacgtcttctcgtggtcgttttcgaaatagagcactttgtaagagtacacaccgctgctgcgcagcttaccgacaatctctaccggtacggtaccgagatcttcaccaatcaccatacagcgatgacgtttactttcgagtgccagaatgctgagcagatcatccaccggatagtgaacatacgcgccctgatctgccgtctcgccatacggtatccaccacaaacgcagcatgctcatcacatggtcaattcgtaatgcgccgcagttttgcatattggcacgcaacagctcgataaacggttcataggcacgcgcggtgatgatatgcgggtccattggcggtaatccccagttctgccccaacgggccgaggatatccggcggcgcgccaacgcttgctttcaggcaatatagttcacggtcacaccaggtttccgccccaccttccgctacgccaaccgccagatcacgatacaagccaatcggcatttcatagccctggcttatctcccagcaggcggcaaactggctgtaagccagccactgcaaccagagataaaaatcgacgtcatcacgatgttcttcgcagaactgacgcacttctggactatccacgttctgatacatctctggccatgcaggccagccccagcgcatttcgtcctctttcacttgctgggcatgtagcgcatcaaaggctgcctgccagaacaggctgtcgccctgctctgcaacaaactggcgaaacgcggccatctgctcatcatcacgttgcgcgaaacctttccacgccattcgtaatgctgtcatttttagggcggtaaccgtggagtaatcgacccagtcggcatcgcgcgcctgttgcagcgtctgttgcgtggtcggcaactgccaccaggcctgagcctcttcgctaagatggaaatcttcaacggcgttaacgtcgatataaatcacattcagccaacggcgagaagacgggctgtatgggctggcgctctccggatttgccggatagagcgcatgaatcgggttcaggccaatgaagctcccgccacgttttgccacatccaccagcatcgctttgagatcgccaaaatccccaataccccagtttttttcgcttcgcagcgtataaagctgaacgcaggcaccccacagcttttgtttattcagcaacgcctgcggttcgtaacagcgtttcggggcgacaatcacccggcaatgcgcgcgctggtcgtcctgggtgagtgtcagcgtgtgataaccttccggcagcttcgtcggtagattgaacgctttgccccccgttacatggcctttgtactgcgttccttcttcggtggtcagcagccagctatattcgccgctgccctccaccaccatcggcatttttttgccgctggtataaaccatgacattcgggactggcgttaccgccactttcgtggcggtacgttgatgcatcgcgtcaagcaaacgccgtttggtttcggcgctaatgctctgcggtttaccgtgggcattgatgtaattggggctaatccccgccgccagcgcggcattatccagacgtttgctttccatcgagcttccttagcgttttgcctgccagatacgagcctgataatcgcgaatagagcgatcgctgctaaacataccgcagcgggcggtattgaggatcgccgcgcgagtccaggcctcctggtcgcggtacagcacatccacctgcttttgtgcctctacataggctgcgaaatccgccatcaccagatacggatcgccgccctgtttgccgatactgtgcagcatctagtcgaaggcatgcttatcgccgtcgctgtatttaccgctttccagctctttcaatactgcgtccagcaccttatctttcttccgccatttcaccgggtcgtagcctttggccagaattgccttcacttgttccacggtatgaccaaaaataaagatattttcttcaccgactttctcggcgatttcaacgttcgccccatccagcgtaccgacagtaagcgcaccattgagcgccagtttcatattgccggtaccggaagcttctttacctgcagtgctaatttgttcggagatatccgccgccgggatcagtttttccgccgcgctaacgcaataatccggcaggaacaccaccttcaacttatcgccaaccagcggatcgttgttgatcacgtcagccactttgttgatcgcaaagataatattcttcgccaggtagtagcccggtgccgctttcgcgccgaagaggaagacgcgcggtacgcgatcagcctgcgggttttcacgaatttctttgtacaacgccagaatatgcagcagattcaggtgctggcgtttgtactcatgcaaacgtttgatctgaatatcgaaaatcgcctgtggattgatctcaataccggtacgaactttcacaaactccgccagacggactttattcgcctgcttgatctcgcgatattgctgacggaatttcgcatcatcagcgaatttttccagattgatcagctgatcgagatcgttagcccactctttttgcagacttttatccaacagagccgccagtgccgggttgcactgtttgatccagcgacgtggggtaataccgttggtgacgttatggaatttgttcggccatagctggtgatattccgggaacagatctttcaccaccagatcgctgtgcagcgccgcaacaccgttcaccgcgaaaccgccaaccacacacaggttcgccatatgcacttgtttgtcgtgcaccaccgccagtttggcccacactttttcatcgcccggccaggttttctctaccagcgttttaaagcgagtattaatttcgttaataatctgcatgtggcgcggcagtaagcctttcaccagtttcacatcccagcgttccagcgcttctggcatcagggtatggttggtgtaagcgaaagttttgctggtaatggcccaggcgtcatcccagctcatctggtgctcatcgatcagcacgcgcagcagttctggaatcgcgatagttgggtgggtatcgttcagctgaataacttcgtaatccgccagttcgtgcagtttacgccccgccagatgatggcgacgcaaaatatccgctacgctacaggcacactggaagtattgctgcatcaggcgcagctttttaccggcagtatggttgtcgtttggatagagaactttggtcagtttttccgcattgatgccctgctgttcggcacgcaagaaatcaccgtcgttaaatttagtcagatcaaacggatgcgcgtgcgtcgcctgccacagacgcagcggctgcgccacgccattacgatagccgacaacggggagatcccacgcttgaccggtaatggtaaactccggctcccagcgtccgtctttcgtcactttaccgccaatccctacctgcacatccagtgcttcgttgtggcggaaccacgggtagttactgcgatgccagtcatccggcgcttcaacctgtttgccatcgacaaaagactggcggaacaaaccatattgatagttcagaccgtaacccgtcgcagactgaccgacagttgccatactgtcgaggaagcacgccgccagacgtcccagaccaccgttacccagcgccgggtcgatctcttcttccagcaggtccgtcagattgatgtcataagccttcaagctatcctgtacatcctgataccagccgagattcaacaggttgttgcccgtcaggcgaccaatcaaaaactccatactgatgtagttaacatgtcgctgattcgccaccggcttggcgaatggctgagcacgcagcatttcggccagtgcttcactcactgctagccaccactggcgaggagtcatttcagccgcagaatttaagccataacgctgccactgacgactaagcgcttcctgaaattgcttatcgttaaaaataggttgactcataggagttccacttttcttagattttcaacacaacgttatcgctagtttgccaggctcgatgttgaccttcctcatcctgcgggggattaggcagggaggagttgcggggatgagcaaggaaatgtgatctcaaccacttaaagctagtgcaaaccacaggattagcatcaaatcaatgcaatacagcgcagaaaatctgtatctaagtgcaaaaaatggccgttgcgtattttcaaaaagcggaaggtaactctataaattaagtaaaggagtgaaacagtttcataagtaaaatatccagtgtgctccatctcattcttaatagatttattaagatcatctttttagatggcactttcatcaggaatgaagaagaaacccttgcttaaatgaatctgatgaacataagggaaaccagtattcacgctggatcagcgtcgttttaggtgagttgttaataaagatttggaattgtgacacagtgcaaattcagacacataaaaaaacgtcatcgcttgcattagaaaggtttctggccgaccttataaccattaattacgaagcgcaaaaaaaataatatttcctcattttccacagtgaagtgattaactatgctgattccgagtaaactaagtcgtccggttcgactcgaccataccgtggttcgtgagcgcctgctggctaaactttccggcgcgaacaacttccggctggcgctgatcacgagtcctgcgggctacggaaagaccaccctcatttcccagtgggcggcaggcaaaaacgatatcggctggtacagcctggatgaaggtgataaccagcaagagcgtttcgccagctatctcattgccgccgtgcagcaggcaaccaacggtcactgtgcgatatgtgagacgatggcgcaaaaacggcaatatgccagcctgacgagtctcttcgcccagcttttcattgagctggcggaatggcatagcccactttatctggtcatcgatgactatcatctgatcactaatccagtgatccacgagagtatgcgcttctttattcgccatcaaccagaaaatctcaccctggtggtgttgagtcgcaaccttccgcaactgggcattgccaatctgcgtgttcgtgatcaactgctggaaattggcagtcagcaactggcatttacccatcaggaagcgaagcagttttttgattgccgtctgagtagcccgattgaagccgcagaaagcagtcggatttgcgatgacgtttccggttgggcgacggcactacagctaatcgccctctccgcccggcagaatacccacagtgcccataagagcgcacgccgcctggcgggaatcaatgccagccatcttagcgattatctggtcgatgaggttttggataacgtcgatctcgcaacgcgccattttctgttgaaaagcgccattttgcgcagtatgaacgatgccctcatcacccgtgtgaccggcgaagaaaacgggcaaatgcgcctcgaagagattgagcgtcaggggctgtttttacagcggatggatgataccggcgagtggttctgctatcacccgctgtttggtaacttcctgcgccagcgctgccagtgggaactggcggcggagctgccggaaatccaccgtgccgccgcagaaagctggatggcccagggatttcccagcgaagcaattcatcatgcgctggcggcaggcgatgcgctgatgctgcgcgatattctgcttaatcacgcctggagtctgttcaaccatagcgaactgagcctgctggaagagagccttaaggccctgccgtgggacagcttgctggaaaatccgcagttggtgttattgcaggcgtggctgatgcaaagccaacatcgctacggcgaagttaacaccctgctagcccgtgctgaacatgaaatcaaggacatcagagaagacaccatgcacgcagaatttaacgctctgcgcgcccaggtggcgattaacgatggtaatccggatgaagcggaacggctggcaaaactggcactggaagagctgccgccgggctggttctatagccgcattgtggcaaccagcgtgctgggtgaagtgctgcactgcaaaggcgaattgacccgcagtctggcgctaatgcagcaaaccgaacagatggcacgccagcacgatgtctggcactacgctttgtggagtttaatccagcaaagtgaaattctgtttgcccaagggttcctgcaaaccgcgtgggaaacgcaggaaaaagcattccagctgatcaacgagcagcatctggaacagctgccaatgcatgagtttctggtgcgcattcgtgcgcagctgttatgggcctgggcgcggctggatgaagccgaagcgagcgcgcgtagcgggattgaagtcttgagctcttatcagccacagcaacagcttcagtgcctggcaatgttgattcaatgcagcctggcccgtggtgatttagataacgcccgtagccagctgaaccgtctggaaaacctgctggggaatggcaaatatcacagcgactggatctctaacgccaacaaagtccgggtgatttactggcaaatgaccggcgataaagccgccgctgccaactggttgcgtcatacggctaaaccagagtttgcgaacaaccacttcctgcaaggtcaatggcgcaacattgcccgtgcacaaatcttgctgggcgagtttgaaccggcagaaattgttctcgaagaactcaatgaaaatgcccggagtctgcggttgatgagcgatctcaaccgtaacctgttgctgcttaatcaactgtactggcaggccggacgtaaaagtgacgcccagcgcgtgttgctggacgcattaaaactggcgaatcgcaccggatttatcagccattttgtcatcgaaggcgaagcgatggcgcaacaactgcgtcagctgattcagcttaatacgctgccggaactggaacagcatcgcgcgcagcgtattctgcgagaaatcaatcaacatcatcggcataaattcgcccatttcgatgagaatttcgttgaacgtctgctaaatcatcctgaagtacctgaactgatccgcaccagcccgctgacgcaacgtgaatggcaggtactggggctgatctactctggttacagcaatgagcaaattgccggagaactggaagtcgcggcaaccaccatcaaaacgcatatccgcaatctgtatcagaaactcggcgtggcccatcgccaggatgcggtacaacacgcccagcaattgctgaagatgatggggtacggcgtgtaagtttagccggataacgcgccagatccggcttacatctctgcatcattcaatgctcacccgcgttacgccatctgtttctatcaaactaaaccgcaccggcaagaaacgctccaccaccgcgatattggtcagcagatggcaactgggatgggcgaccgtaaattcccccgcgcccgccagcgccatcggtagcaccagttggtcagcaagatattcccccaccgccgccgtgcttgccaggtagcgtttcacctctttcaccaactgtgccgcaaccacctcggcactgacgcgcttttcaccgacgacaaaaaagcgttcggtgatattttcactttcgacttcaaggctgacggtattacccggcccctggtcgcgcggcaggttatgaatattctgttcatgcagggaaaaactccccgccagtgtagcgatttcacgctcagcaacatggcgcggcacaccagctaatagaacttctccacgcatctgcacaatgttcccgcgctcgccaagttgcaaggtgttaaagcttgccacggggctgacttccgttgccaccacaccgcctccggcagggtaaaaaccgtggcgtaacagcgtggtttgctgatgaattcctattttcgccagcagcggctccagcacccggcggataaaatccgcaggcggcgcgctcgggttatcggtgccgccgctcacttcaacacggctaggtccatcggcaaaccacagcgcgggcagcaccgtttgcagcaccagcgtacaacttccggcgctaccgatagcaaagcggtaatcgccgccgcgcacggtgccgggccggaagagcagacgctggctccccagctccgcgccttccacggttgctccgcaaatttccgtcgccgcctttaccgcggtcagatgctggcgcaacagccccggtttcgcccgcccggcacgaatgctggtgatggtaaatggctggccggttatcatgctcaggctcagcgcgctgcgcaggatctgcccgccaccttcgccctgtgcgccatccagcgcaatcatccttttcatcatttatccttttacgcacaccacctgacgcagggtatagataacttccaccagatcgctttgtgccgccatcaccgcatcaatatctttatacgccatcgggatttcgtcgatcacttcggcatctttacggcattccacatgcgcggtggcacgaatttgatcttccacgctgaacagttttttcgctttagttcggctcattacccgcccggcaccgtggctgcagctacagaagctctcttcatttcccagcccacggacgataaagctttttgctcccatgctaccgggaataattccatattgaccagcacgcgcagacaccgcgcctttacgcgtcacgtagatctcttcaccaaagtgctgttctttttgcacatagttgtggtgacagttgatctcttccatcgccagcgtttgtggctgtctgaccgttttctgcgtaatgctctgcaatgccgttaccacgttttccatcatcgcatcgcggttaaggctggcaaaaagctgcgcccaggccacggctttcaggtaatcatcaaagtattccgtaccttccataaagtacgccagatcacggctcggcaacgtctcaagcgtttcctgcatctctttttgtgccagatcgataaagtaagtcccgatggcgttaccaattccgcgactaccggagtgcagcataatccacacctggtcgctctcatcaaggcagatttcaataaagtggttaccggttcccagcgttcccaggtgtttatagttattggtattcaggaaacggggatatttttgcgttaaccactgataaccggcttcaagctcagcccatttagcatcgacgttaacaggtggattttcccaggcacctttatcacgtttacaacggccagtggtacgcccgtgcggcacggccgtttcaatcgcctgacgcagctctgccaggttttcaggcaggtcttccgccgttaacgcggtacgcagcgcgttcattccacagccaatatccacgcccaccgccgccggaataatcgcccctttggtcgggatcacgctaccaatggtggaacctttacccaggtgtacatcaggcattaccgcaatatgtttgaaaataaacggcatcttcgccgtattaataagttgctgacgcgcatcggcctctaccggcacgcctttggtccacatttttaccggggcattttcagtggtcagtaattcgtaattcattttgtttttctcttttcgttgtttgctgtcctgataattgcaaccgtcgtgccagaaaattaaataagcagcttaattttttaattcattgttttaaaaaagattatatctttacgtccgtaaccggagatttcccgcaaagccaatttaccgataatgaaatatcgtcttttataaggatatctaagatgcgtaaaacagtggcttttggctttgtcggtaccgtactggattatgccgggcgcggcagtcagcgctggagtaaatggcgtccgacactctgtttatgccagcaagaaagcttggtcatcgatcgactggaattgttgcacgacgcccgcagccgcagcctatttgaaacgcttaaacgcgatatcgccagtgttagcccagaaacagaagtggtgagcgttgagattgaactgcataacccgtgggatttcgaagaggtctacgcctgcctgcatgatttcgcccgtggttacgagtttcagccagaaaaagaagactatttaattcacatcaccaccggtacccacgtcgcgcagatttgctggtttctgctggcagaagcgcgttacctgcccgcccggctgatacaatctagtcctccgcgcaaaaaagaacagccgcgcggcccaggtgaagtaacgattatcgatctcgatttaagccgttataacgccatcgccagccgctttgccgaggaacgccagcaaacgcttgattttcttaagtccggcattgccacgcgtaacccccacttcaaccgcatgattgagcagatcgaaaaagtggcgatcaaatcccgcgcgccgattctgcttaacggtccaaccggcgcgggcaagagttttctggcgcgacgcatcttagagttaaaacaggcgcggcatcagtttagcggcgcgtttgtggaagtgaactgcgccaccctgcgcggcgataccgccatgagcacgctgtttggtcatgtaaaaggcgcgtttaccggggcgcgggaatctcgtgaaggtttattacgcagcgccaacggcggaatgttgtttcttgatgagattggcgaactgggcgcagacgaacaggcaatgctgctgaaagccattgaagagaaaaccttttacccgtttggcagcgatcgccaggtgagcagtgattttcagcttatcgccggaacggtgcgcgatttgcgccagctggttgccgaaggcaaatttcgcgaagatctgtacgcgcggatcaatctctggaccttcaccctgccgggtctacgccagcgccaggaagatattgaaccgaacctggattatgaagtggagcgccacgccagtctcactggcgacagcgtgcgttttaacaccgaagcgcggcgcgcctggttggcttttgcgacctctccccaggcaacatggcgcggtaactttcgcgaactttctgccagcgtcacgcggatggccacctttgccactagcggacgcatcactctggacgtggttgaagatgagataaaccgtctgcgctataactggcaggagagccgcccctccgcgcttacggcgttgctgggcgcagaggcagaaaacatcgatctcttcgaccgtatgcaactggaacacgttatcgctatctgccgccaggcaaagagcctttccgcagccggacgccagctttttgacgttagccgccagggcaaagccagcgtcaatgacgcggatcggctacgcaaatacctggcgcgttttggtctgacgtgggaagccgtgcaggatcagcacagctccagttgaatatggtggtccgtcagcacctgcatcacgcttactggcggcggggcgtcggtgtagacggcatctaccatgctgatgctgcccatattgaccatcgcgttacggccaaatttcgagtgatcgacaaccagcataacgtggcgcgagttctcaataatggcgcgtttggtgcgaacttcgtggtaatcgaactccagcagcgagccgtcgctatcgatgccgcttatccccagaatgccgaaatcaaggcggaactgggagataaaatcgagcgtcgcttcgccaatgatcccgccatcgcggctgcgtaattcgccaccggcgagaatgatgcgaaaatcttcttttaccatcaacgtgttagcaacgttgagattgttggtgacaatgcgcaaattgctgtgattgagcagtgcgtgcgctaccgcttccggcgtggtgccgatatcgataaacagcgtcgagccattggggatttgctccgccactttgcgggcgatgcgctctttttcttcggtctgggtggccttgcgatcgtgccacggcgtgttaaccgaactggaaggcagcgccgcaccgccatgatggccaggatcaggttttgctccgccagctcattgaggtcgcggcgaatagtctgcgggctgacggagaaatgctctaccagctcttcggtactgacataaccctgctgtttaaccagttcgataataccgttgtgacgttgtgtttgtttcatttataaatccctggaattattttcgttttcgcgcattgaggctatcaacaaaagccatcgctaaacccacggctaacccggcgatgtgtgctccgttcgccatgctcatcccaaacaaatcaaaccatccggcgacaatccagatcagcgcaaagataattaacccacgttgcaggtaaatgccactttgcggatcgcgttcgccacgtagccagacgtagcccatcagcgcatacaccacgccagaaagcccgccaaaccacggcccgctgaatttttgctgcacatagccgcttaacagggcgctgataagcgtaatgacaattagcttaccgctaccgaggcgtttttccaccgcaccgccgagataccaccaccagagcaggttaaagaggatatgcatcaggctgaagtgcattaacgcgtgggtgaagtaacgccagaactcaaatttcagtgttggatcgaatggccaggccagccataacatcacttcctgatcgccgagaatttgcatggcaataaacaccaccacgcaggcgatcatcatcacccaggttaccggacctgcgcgttcacgcaaggcggcaaagaaaggataacggcgataatgcaggccactgccggtatggcctgcctgccagctcgccgccagataacgcggatctgccgggttttcgagaaaacgcgccagctccgcccgtacgcgctcggcctgggactcatccgccagccagacatcgctttggttatgttgttgaatcgtgaggataacaccctgcgtcgccatgtaatcaacaaacgcctgcgccacgcgggggttagcaaaagaggtaatcatcaacatcgttgctgtcgcttattccacacaaaaggggacagtataaagcgttacgcgccgtacgccacctctgcgggaaactgacgttgccaggcttcaaagccgccgtcaatgctatagaccacatcgtagccctgttgcagcagatactgcgccgcgcctttgctgctattgccgtgataacacatcaccatcaccggagtgtcaaagtcgttatcacgcataaaagcgcccagcgtgtcgttggttaaatggaaagcctgcaccgcatgtcccattgcgaaactctgtggatcgcgaatatcgaccagcaccgcctctttttcctgcaacttctggtgcgcgtcggcaacgttaatacattcgaactgatccatgcgtctctctttctttacaaacaagtgggcaaatttaccgcacagtttacgtcgaagcggcagataaacgccataatgttatacatatcactctaaaatgttttttcaatgttacctaaagcgcgattctttgctaatatgttcgataacgaacatttatgagctttaacgaaagtgaatgagggcagcatggaaaccaaagatctgattgtgatagggggcggcatcaatggtgctggtatcgcggcagacgccgctggacgcggtttatccgtgctgatgctggaggcgcaggatctcgcttgcgcgacctcttccgccagtagtaaactcattcacggtggcctgcgctaccttgagcactatgaattccgcctggtcagcgaggcgctggctgaacgtgaagtgctgctgaaaatggccccgcatatcgccttcccgatgcgttttcgcctgccacatcgtccgcatctgcgcccggcgtggatgattcgcattggtctgtttatgtacgatcatctgggtaaacgcaccagcttgccgggaagtactggtttgcgttttggcgcaaatagtgtgttaaaaccggaaattaagcgcggattcgaatattctgactgttgggtagacgacgcccgtctggtactcgccaacgcccagatggtggtgcgtaaaggcggcgaagtgcttactcggactcgcgccacctctgctcgccgcgaaaacggcctgtggattgtggaagcggaagatatcgataccggcaaaaaatatagctggcaagcgcgcggcttggttaacgccaccggcccgtgggtgaaacagttcttcgacgacgggatgcatctgcctagcccttatggcattcgcctgatcaaaggcagccatattgtggtgccgcgcgtgcatacccagaagcaagcctacattctgcaaaacgaagataaacgtattgtgttcgtgatcccgtggatggacgagttttccatcatcggcactaccgatgtcgagtacaaaggcgatccgaaagcggtgaagattgaagagagtgaaatcaattacctgctgaatgtgtataacacgcactttaaaaagcagttaagccgtgacgatatcgtctggacctactccggtgtgcgtccgctgtgtgatgatgagtccgacagcccgcaggctattacccgtgattacacccttgatattcatgatgaaaatggcaaagcaccgctgctgagcgtattcggcggtaagctgaccacctaccgaaaactggcggaacatgcgctggaaaaactaacgccgtattatcagggtattggcccggcatggacgaaagagagtgtgctaccgggtggcgccattgaaggcgaccgcgacgattatgccgctcgcctgcgccgccgctatccgttcctgactgaaagcctggcgcgtcattacgctcgcacttacggcagcaacagcgagctgctgctcggcaatgcgggaacggtaagcgatctcggggaagatttcggtcatgagttctacgaagcggagctgaaatacctggtggatcacgaatgggtccgccgcgccgacgacgccctgtggcgtcgcacaaaacaaggcatgtggctaaatgcggatcaacaatctcgtgtgagtcagtggctggtggagtatacgcagcagaggttaagcctggcgagctaaattaacgtaaggtgatcaggtcagatttcaatctggcctgagactgatgacaaacacaaaactgcctgatgcgctacgcttatcaggcctacgtggtttatgcaatatattgaatttgcatggtcttgtaggccagataagacgttcacgtcgcatccggcatgaacaaagcgcactttgtcaaaaatctaacctactttttaattcagggaattaccgcaaagcccacgccatcatacccaacgtaacaaaactcaggcacgttccccactcgcccgctgaaaaatagcattaatgcgcccagcgccagcataaaaattttgagcagaaggtaaattgttggcgtgataaggatattacaaacttcaataataccggcaagtccgacacccagcatggcaataaccaccgccaaaaattgcgccagtatggggatgccgaaaaaagtcattaccaggctggtcaaaatccattttctgttttgcattattctttccattctttttgaatggtgaaattatactccccgagtccccttgccccttctggacacttttccgaaatgatggcggaaaaaaacgggaccctttggccccgttctatttattggtgaacttacaatctcaccggatcgatatgccagatatgatcggcgtactctttgatagtacggtcagaagagaagtagcccatattggcaatgttcagcatcgcttttgcggtccactcttcctgaagctcgtagagttcatcgactttatcctgacaatcgacatagctgcgataatccgccagtacctggtagtgatcgccgaagttgatcaggctatcaaccagatcgcgatagcgacccggatcttccggactgaatacaccgctgccgatttgcgtcagcacctgatgcagctcctcatctttctcgtagtattcacgcggtttgtagccctgacgacgcagttcttccacttcttccgctgtgttaccaaaaataaagatattgtcagcaccgacatgatccagcatctcgacattcgcaccgtccaacgtaccgatagtcagcgcaccgttaagcgcaaacttcatgttactggtgccggaagcttccgtccctgccaggctaatctgttcagacagatctgccgccggaatgatcaactgcgccaggctaacgctgtagttcgggatgaacacgactttcagcttatcgccaatctgcggatcgttgttgatcactttcgctacgtcattgatcaaatgaataatgtgcttcgccatgtaataggcgctagccgccttaccgccaaaaatattcacgcgcggtacccacttcgcatccgggtcggccttgatgcggttatagcgggtaatcacatgcaacacattcatcaattgacgtttgtattcgtgaatacgtttgatttgtacatcgaacaacgcctttggattcaccaccacattcagctgctgggcgatatactctgccagacgctttttgttctccagcttcgcctgatgcacagcgtgattaaccattgggaaatcacagtgttgttgcagctcattaagcaggctaaggtcggtgcgccagttacggcccaggtgttcgtccagcacggcactaaggcttgggttcgctaccgccagccagcgacgcggcgtcacaccgttggtgacgttggtgaaacgacccgggaagattttcgcaaagtcggcaaacaagctttgcaccatcagattagagtgcagttcgcttacaccgttaactttgtggctcacaacaaccgccagccaggccatacgcacacgacgaccgttggattcatcaatgatgctcgcccgtcccagcagatcggtatcgttcggatactgttcctgcaaggttttcaggaaatagtcgttgatttcaaagatgatctgcaggtgacgcggcagaattttacccagcatatcaaccggccaggtttccagcgcctcgctcatcagcgtgtggttagtgtaggagaagacctgacaacacacctcaaacgcgtcgtcccagctaaattggtgctcatcgatcagcagacgcatcatctcaggaatgctcagtaccggatgggtatcattgagatgaatcgcgattttatccgccaggttatcgtaggttttatgcaactgataatggcggcttaaaatgtcctgaatggtgctggaaaccaggaagtattcctgacgcaggcgcagctcacgcccggagtaggtggagtcatccggatacagtacgcgagatacgttctcggagtggtttttatcttccactgccgcgaagtagtcaccctggttgaatttaccgaggttaatttcgctactggcttgcgcactccacaaacgcagcgtgttggtcgcgtcggtgtcgtaaccagggattatctgatcgtaagcgactcccagaatctcttcggtttcaatccagcgcgtttttttaccttcctgctgaatgcgaccgccaaaacggactttatagcgcgtgttgtggcgtttgaattcccacgggttaccgtattccagccagtagtctgggctctctttctggctaccgttaacgatgttctgcttgaacataccgtagtcatagcggatgccgtaaccgcgccccggcaaccctaacgtcgccagagaatcaaggaagcaagccgccagacgtcccaggccaccgttaccgaggcctgggtcattttcttcatcaatcagctcttcgagatttaaccccatcgcttccagtgcgccctgtacatcttcgtaaattcctaggctcaacatggcgttggagagcgtacggccaatcaaaaactccatgctcaggtagtaaacctgacgagtttcttggctcaactgggcacggttactacgtaaccagcgctccacgagacgatcgcgcacagcaaataacgttgcgttcagccattcatgtttattggcgacgaccgggtcctttccaatcgtaaacatcagcttgtaagcgatagagtgcttaagagcttctacgctaagcgtggggctactatatgtaaacggagcattcatataggcgtttcctgaaaattatttcaagcgatagtaaagctcacggtagctcttcgccgcgacctgccagctaaaatccattgccatagcctgacgttgcacaaaccgccacagactaggacgggaccacagtacaaaagcacgtcgaatagcccgtaacaggctccaggcattactatcttcaaagacaaacccactggcgacgccatctgcaaggttctcaagagaacagtcagaaaccgtatcagcaagcccaccggtgcgccgcactaacggcagcgtaccgtacttcaatccataaagttgcgttaagccgcacggttcaaaacggctgggcaccagaatgacgtccgcgccgcccataatgcgatggctaaatgcttcgtgatagccaatctgaacgcccacctgaccggggtattccgctgccgccgcaaggaaaccttcctgcagcaccggatcgcccgcgccgagtagcgccagctgcccgccctgctccagaagacccggtaaggcttccagcaccaggtcgagacctttctggctggtcagacggctcaccactgcaaaaagcggcactttatcgtcaaccttaagccccattgcgatttgtaactggcgcttattttccgctttatcttccaacgtatcgcgggtgtaacggctggccaacagtaagtccgtctctggactccagattttctcgtccacgccgttcagtacgccggaaagacgcccttcacggtgacgctgttgcaacagaccttccataccgtaggcaaactgcggttcggtgatctcgcgagcgtaggttggactgaccgccgtaatgtgatcggcatagtacagaccggccttcaggaaagagatttgtccgttgaattccagcccatgaatattaaagaaactccatggcaattggatgtcattcatgtgatgtgcataaaacatgccttgataggccaggttgtgcacagtaaacacgctcttcgccggacgcccgcgcgccgccagatacgcaggcgcaaggcctgcatgccagtcgtgcgcatgcaccacatcaggacgccagaatgggtcaagcccgctggccatttctgccccaacccaccccagcagcgcaaaacgcaatacgttgtcggtataggcaaataagttggtatcgtgatacgggcttcccggacgatcatagagatgcggcgcgtcaatcaggtaaatgccaaccccgttgtaatgaccgaacaacagcgtgatatgtccggcgaaggtatcacgacgggatactacctgcgcatcggtcacgccacggcgaatatcgggaaatgcaggcaacagtacgcgagcgtcaacgccgtctgcgatttgtgctgcgggtaatgccccaataacatcagccagaccgccggttttaagcagcgggaacatctcactacatacatgtaaaacctgcattatcgctcctgtttatgccctaacttccgtagcatttcgcgcgttaccagcacgatgccttcttcactacgatagaaacgacgtgcatcttcctctgcgttttcaccaatcaccatgccttccggaataacacaagcacgatcgatgacgcagcggcgcagacggcagctgcgacctacccatacttccggtaacaatacggcggaatcaatgttgcagaaactattcacgcgaacgcggctgaacagaacggactgcaccaccacgctaccggagatcacacaaccgccggaaaccagactgttaagggtcatcccgtggctaccggagcgatcctgcacgaatttcgctggcggtaaactttcattgtaggtgcgaattggccaattgcgatcgtacatatccagttccggcaccacagaggccagatcgaggttcgctttccagtaagcttccagcgtacccacatcgcgccagtacggctcggcatccgggtcggattgtacgcaagagagcgggaacgggtgcgcataggccagaccggcttcggtgatcttgggaatcaaatctttgccaaagtcgtggctggagttctcatcgcgatcgtcttcttccagcagttcatacagatagtcggcgtcaaagacgtagatacccatactcgccagagatttgctcggatcgttcggcatactcggcgggttagcaggtttttcaacgaattcgataattttatcgttctcatcaaccgccataacgccaaatgcggaggcttcttcaatcggtactggcatacaagcaacggtgcaacgtgcgcctttttcgacgtgatcgataagcatacggctgtagtcttgcttgtagatatggtcgcccgccaggatcaccacgtattccgctttataacggcggataatgtcgaggttttgggtgaccgcatctgcggtgccgcgataccagttttcccctttcattctctgctgtgctggcagcagatcgacaaactcgttcatttcttcattgaagaaactccagccgcgctgaatgtgctgcaccagagtgtgggactggtactgggtgatcacgcccatacgacggatcccggagttgatgcagttagacagcgcaaagtcgataatgcggaacttaccgccgaagtgtacggccggttttgctcgcttattggttaaatccttcaggcgggtaccacgtcctcccgccagtatcagggcaacagatttcaatggcagctggcgcgccaacattaagtgatcgttcttctctaaactaaccatgactaactccttttttatcatctctggaacacacacaatccgtgtgcaggtccctgccagacagccgtaatcactgggttatcctctccagcgaatgggggaatggcgtgccactccccagcaggtaaaacaatctctgttacctcaagcgtggcgttaattgcgatcaaaaagcgatcgctgagcagaatttgcagctgtttcggcccgttttgccactcatccgtgcttaaaggttgagcatatcgatttagccaacggacattgccgtcgccttcttcccaccagcgattctccaccaaagcgggaatgcgcttgcgcagatggattaacgcggcggtaaatgcggttaaaccactgcttgcctggctccagtccaaccaggttaattggttatcctgacagtaggcattgttattgccatgctggctgtgaccatgttcgtcaccggccagtaacatcggcgtaccctgggagagcaacaacgttgttaacagggcgtgaatgctgtcgcgccgccgttcaaccaggtcaagagaaccgcctaacccttctttaccatgattgttactgtaattgttgttggtcccgtcgcgattttcttctccgtttgcttcattgtgtttatggttgaagcaaacgcagtcgcgaagcgtaaaaccgtcatgcgcggtgacgagattaatcgcggcactcggcagacgaccattacgtttaaaaacatcgctggaggcagcaaaacgcccggcaaacgcccccagaggcaaatcataatgtagccagaaacgacgggcagcatcgcggaaatgatcgttccactcggcaaacagcggcgggaaatttcccacctgataaccaccaggagcgatatcccacggttcagcaattaacttcacctggctgagcaccgggcagttctggatagcggtaaacaacggcgcatcctgacggaactctggcgtacggcccatgactgccgccagatcaaagcggaaaccatcgacgtggcaggtttctacccaataacgcaggcaggcgctggcataatccaccaccgccggatgactcaaattgagcgtgttgccgcaaccggtccagttgtgataatcgccgtcttctcttatccaataatagctacggttatcgatcccacgcaggctgaataacgggccgtcgaggtccagttccgcactatggttgagcacgatatcaagaatgacttcgatacccgctttatgcagtgctttgattgcatcgcgaaactcatccagcgccgtttctgggctgcaggcatacgccggatgcagcgcaaacatcgccaccgggttgtaaccccagtagttacttagccccatgcgttgcagacgtggttcactggcaaactgcgccactggcagcagttccagcgcggtaatgcccaattgtttcaaatagttgatcatcaccggatgcccgagggctttataagtgccacggatctcgaccgggatctccgggtgcaagtacgttaatcctttgacatgggcttcataaatgatggtgctgccccacggcgtgcgcggcggggcatcatcttcccagtcatagtgatcaaccaccactacgcatttcggcgcaatggcggcgttgtcgcgatagtcaggttcattatgaccggcgtgcagcagcgggttatctttaaactccccgtcaatttgccgcgcgcaaggatcaatcaacaacttcgccgggttaaagcgatgcccctcggcgggttgccaggggccatgaacgcgataaccataacgcaaacccgggcgcgcatccggcagataaccgtgccaaatgtcgccactgtgccctggcaagtcatagcgatgttcctggccattggcgtcaaagacacacagttctacccgctcggcatgagcggagaaaagtgtgaagttgacgccctgaccgtcgtaatgcgcgccgaggggagcgggtttgccaatggcgagttgtgtcattctgcctcccgaaccagccagatagtggccagcggtggtagcgtcaggcttagactatgctgacgaccgtggctggcaatctcatcgctgtgtaccgtgccgccattgcctgcattactgccgtgatagtgcatggaatcggtattgaggatttcacgccatttgcccggctggtttatgccgaagcgataatcatgacgcggtaccggcgtaaagttactggcaacgatgatttcgttaccctctttatcgcgacgcacaaagatcagcacgctgcgttctttgtcatccaccaccagccattcaaagccgtacgggtcaaaatccagttcatgcattgctttatggtggcggtaggtgaggttcagatcgcgcaccagacgctggacaccgtggtgccagttatcgccgccttccaacagatgccagtcgaggctggcgtcatggttccactcgcggccctgggcaaattcgttacccatgaacagtagtttcttgcccgggaatgcccacatccagccatagtaggcgcgcaggttcgcgaatttctgccatgcgtcgcccggcatgcggtcgagaatgctttttttaccgtggaccacttcatcatggctcaacggcaggacgaagttttcagtgtagttgtagagaatcccgaaggtcagtttatcgtgatgatactgacgataaaccgggtcgagcttcatgtagtccagggtgtcatgcatccagccgaggttccacttgtaccagaagcccagaccgcccatatcctgcggacgagaaacgccagggaaatcggtagactcctcagccattgtcaccgcaccggaaacctgctcaccaagaatacggttggtattacgcaagaattcaatcgcttcaagattctcgcgcccgccaaattcgttcgggatccactccccctctttacggctgtagtcgcgataaatcatactcgccaccgcatcgacgcgcagcgcatcaataccaaaacgttcaatccagtaaagcgcgttaccgacgaggaagttactgacttcacggcgaccatagttgtagatcagcgtgttccagtcctgatgatagccttcacgcggatcgctgtgttcatacaagttcgtgccatcaaattcggcaagcgcaaagtcatcagtcgggaagtggcctggcacccagtcgagaatcacgttcagaccagctgcgtgtgcggcatcaatgaaataacggaagtcgtcgcgagtaccaaaacggcgggttggcgcatacaggccggttggctgataaccccaactgccatcgaagggatgctcgttaatgggcagtagttcgaggtgggtaaagcccatccatttagcataaggcaccagttgatcggccagctcgcggtagctcaaccagaaattgttgtcggtgtggcgacgccaggaacccaggtgaacttcataaatagagattggcgcatcaaactgattcgcttttttgcgctcttcagtctgtacaaccttttccggcagcccgcaaataagagacgcggtttccgggcgcatttgcgcttcaaaggcataagggtcggacttcagacgcaagttgccattggcatcaatcatctcgtatttatagagctgaccgttatgcgccccagggataaacagttcccagatgccgctctctttacgcaggcgcatcgggtgacggcgaccgtcccagtagttgaattgcccaaccacgctgacccgacgggcgtttggagcccagacagagaaacgcgtacctgtgacgccatccatagtatctgcatgcgcgcctaaggtttcatacgggcgcaggtgagtaccttcagataatagccaggcatccatttcctggattagcggaccaaaacggtaaggatcatcaatcaggttttgctgaccatgccagacaacagccaactgatagcggaaaaaattcttacgtcgcggaatgacgccgctaaagaatccccgactgtcgagacactccagttttgcgagtttgcgcccggttttcggttcaatcacccacacatcggtagcgtcgggtaaaagggcacggacttccagtcccgcggtggttttatgcattcccagtacggaaaaaggatccgcaaaatggcctgcaattagcgcgttaatcacgtctctatcgatacgatcggacatgcttgtcttcctgttttattgtgtcaccccatccaattggatttttgacttctggttgtgacatttttttgacctgaacggcgcagcactctgtgcatcctctctgcgtcgtcctcacttcaggtaaggctgtgaatactcatgtattcagccacccttaaagaatagccaatgctctatttaactcccggtaaatcatgaaacatctgcgcttactcctgtattacgcactaacaggggcggcatcgcgccccagatttaatgaataaagattacgccagttgacgaagcatccgacgcagcggctccgcggccccccacagcagctggtcgcccacggtaaaggcactcaggaactctggtcccatattcagcttacgcaggcggcctaccggcgtggtcagcgtgccggtaacggcagctggggttagctcacgcatagtgatttcccgatcgttcggaacgactttcgcccacggattgtgcgcagccagcagttcttccacggtcggaatagacacatcttttttcaatttaatagtgaatgcctggctgtggcagcgcaatgccccgacacgcacacataaaccatctaccggaattacggaagatgtgttgaggatcttgttggtttccgcctgccctttccactcttcgcggctctgaccgttatcgagctgtttgtcgatccacggaatcaggctacccgccagcggcacgccaaagttatccaccggcagctcaccgctacgggttaaggttgtgactttgcgttcgatatcgagaatagcagaggacggggtcgcgagttcatctgccacatggccatacagatggcccatctgggttaataactcacgcatatgtcgcgcaccaccgccggaagcggcctggtaggttgcaacggacacccaatcaacaagatcattggcgaataaaccacccaagctcatcaacatcaggcttacggtacagttaccgccaacaaaagtcctgatgccattatttaatccgtcggtaatgacgtcctgattgacggggtcaagaatgatgatggcgtcatctttcatgcgcagagagcttgctgcgtcaatccagtaaccttgccatccgctttcacgaagctttggatagatttcgttggtataatcgccgccctgacaggtcacaatgatatcgagggcctttagcgcctccagatcaaaggcatcctgaagtgtgccagtggttccgccaaaagacggcgcagcctggccaagctgagaagtagaaaagaagacagggcgaatggcgtcgaagtcgcgctcttcaaccatgcgttgcatgagaacggagccgaccataccgcgccagccgataaaaccaacatttttcataagcgtttttttcctgcaaagatgtgtgctgtataaatgtgccggtctcctcttggcacatctttcaccatacaaaaagcagccaaagtcgcaagtgaaattaatcaatgatagcgaagccatcagtaatgcgacttatcctgctttgttagcacgcagaaagtccgcggcaattatcagggaatttgagttatgaatgaaatcatttctgcagcagttttattgatcctgattatggatccgctcggaaacctacctattttcatgtccgtactgaaacatactgaaccgaaaagacggcgggcaatcatggtgcgagagttgcttattgctctcctggtgatgctggtgttcctgtttgcgggtgagaaaattctggcatttcttagcctacgagcagaaaccgtctccatttctggcggcatcattctgtttctgatcgccattaaaatgattttccccagcgctagtggaaatagcagcgggcttccggcaggtgaagagccatttatcgtgccgttggcaattccgttagtcgccgggccgactattctcgccacgctgatgttgttgtctcatcagtacccgaatcagatggggcatctggtgattgctctgctgctggcctggggcggcacctttgtcatcctgctacagtctagcctatttttacgtctgctgggcgagaaaggggtgaacgcacttgaacgcctgatgggattgattctggtgatgatggcaacccagatgttcctcgacggcattcgaatgtggatgaaggggtaacgaggagagtttttcgaaaagaacccggtagcgtcacaactaccgggcgaacaaacttaactcaacagctggaacgcaatcatcccaacgatggcaccgacagtgccgaggatggtttccatcatggtccaggttttcagcgtttcggcttcggtcgcgccggtaaatttaccgaacaaccagaaaccggcgtcgttaacgtggctgacaacaatgctaccaccagcgatacaaatgctcagcgccgccatttgcgcaccggagtagttcagttgttcaataaccggcatcaccagtcctaccgccgttaaacaggctacggtggcagaaccctgaatgatgcgcactgcagctgccagcacgaagcaggtgatagcaatcggcaggcccatgccggttaacgcttcgcccagtgccggacctacgccagagtcaaccagcacctgtttgaacacgccgcccgcaccaatcaccagcagaatgatccccgccggttgcagcgcgtgaccgcaaatctccatcactttgtcttttggcatgccctgacgcattgccagaccgtaaatcgccaccagacaagcaaccagaatcgcggtaaacggatgaccgataaactcaaaccattcgtaagcagtacttccttccggcacaaaacgcgcggcaatggttttcagccctaccagcaccagcggcagcaggatcaggctcaggctgaatccgaaagatggcattttgccttcgccgagatgcggttcgctgatgtcgtcaggaatatgcagctcaacgtaacggctgatgaagttaccccacagcggcccggcaataatcattcccggaattgccgcacacaggccaatcaggatcatccagccaaagtcggcattcatctggcttgccagcagcatcggcgctggtccaggcaccagaaatgccgccgctgccgccacgcctgcaaataatgggattaccagcttcaccaggttcgtaccggtgtggcgcgccatactgaaagcaacgctaatcagcagaactatcgccacttcaaagaacagcggtagcgcacagaccagccccgcaaggccgatggcataatgcgcgcggctgtgaccgaaggatttgagcattttgacggcaatctgatcgactgcgccggtttcatgtaagatcttgccaaacatagctcccagggcgacaaccaccgccaggaagccgagggtgcctcccatccctttttccatcgtcgctgcgattttatcgagcggcataccagaaaaaaggccagcccccatggacaccaccattaaagccaggaaagcgtgcatacgcgccttcatgactaaaaacagcagcagtaaaacagaccctactgctgttaaaacaagcgttaatgtagtcactacttatttgccttttttaataacctcaatggtgcttgccacaacaccttccagcggttgatcgatatccaccaccagtacatcggtttcgtccgcacccggctcctgcagcgtttcaaactgcgtcaccaacatttgggttttaaagaaatggcctttgcgcgctttcaggcggatttcaatcacatcaaaatcgcctttcaaatagatgaaagagagattcggattaccttcacgcagcaagtcgcgatagtgttttttcaatgcagaacagacgatcaggctcactttattagtgcgctgcatagcaaacgcggcgtcgttcagcgcctgcaaccacggtttgcgatcgtcgtcattcagtggttcgccagacgccattttttcgatattgcgccgtggatggaggaaatcgccatcaagaaacgcggcatgaagttgatgcgccacttcactggcgaccgcagatttgccgctgccgcttacgcccatcaagacgtaaatgtggtgatcatggttagtcgtgctcaaagtggtgcccccacaatacaagaattaaaaatgttacgggtaactgttatcggtaacattgtccagccggacaatatcagaagcaatatccatccatgccttaagtgtataagtgtgagctacttcaaatttgtgggcttaaatagatccgcccggactcaaggtgaaacctaaatctaacattttcggtgtcacagattcgccacgaatacgcgccagcaggcgttcagcgccaatactgcccatccgctcacgcggcgtcagcacgctcgcaagtcgtggctccatcacctgaccaatgtcatgaccgtggaaaccggcaatcgccatatcgtcaggaacttttaaccccagacgctgacattcaaacgccgcgccgaccgccaggtcatcattcgtacagaacacgccatccagctgcggatattcccgccgcgcctggcgaatcagttcaataccggaagagtaagaagaagattgctcaaccatcacgctatatggcaccaggcctgcatccagcatcgcctgttcgtatcccttctgtttgatgatagtacgttcgtcgagacgtgcgccgagataggcaatgtggcgatgcccgcgagcaataatggcagtggtcatctggcgtgctgcttcaaagttatcaaaaccgacggcgatatcaaggcatgggctcttgctgtccatcagttccaccacgggaatacccgccacttcaatcatctttaaggtgcgcggcgtgtgggtacgttcggtgaggatcaggccgtcgatattccaggagagcatggattcgaggcgttcttgctccatttccggtttataaccgtagtgcgccagcatggtctgataaccgtgcgcgtcggtgacgctttcgattccgcgtaatacttccgcgaaaacctggttggtgagagaaggtaacaggacgccaatcgcccggctggtggcgttagagaggatatcgggcgcacgattgggaatatagcccagttcatcaagagccgcggcaatcttgccgcgtagagcgacggaaacctgctccgggttgcgtaaaaaacggctgaccgtcattttggtcacgcctacacggtcagccacatcctgaagtacgggtcttttctttttcatcgtcctgaaggtacaaaagagatagattctcttagtttaacacggacacatcagaaccttcccggggaaaacagtgcttgtttacaattattagatatacactaaatcaattgcatcgcattgtgctaacgacgcggcaaaaccccggaagcgtacatcagcacgcgaccggagcgagcgaggaagcctgcaaaaaggcaggcttcaaagatgccgttgagttttaaaccggcggcagatcgaacagtaacacttcgctgtcgctatccgcatggatggagattgcctgctcatcccagattgccagaccatcgctggtgctggctttcacgccgttaatggtgacattgcctttcaccacctggatccagacgcggcgttcagcggcaatctgatgcacgctctgctcatctttcagcaacgcccagcggtacagttccatatcctgatgcactttcaaactaccatctcgcgcatccgggctgagcaccagctgtttgccctgtacggcatcgaagcgacgctgttcataacgcggcgtaataccgttttcttcaggcatgatccagatctgatacagatgcagacgctcggtgctgcttgggttgtactcactgtgacgaatacccgtaccagcactcataatctggaactcacccgccggaacctgctctttattgcccatgctgtcctgatgctcaacagtaccttccagcacgtaggtcaaaatttccatatctttatgcgggtgagtgccgaagccctgccctgcttcaatcacgtcgtcgttaatcacgcgcagcgcggagaagcccataaagttcggatcgtaatagttggcaaaagagaaagtatgccaggagtccagccagccatgatttgcatgaccacgttcatttgctttgcgtaagtagatcatttgtattcgccccctgaatgatttcgatgggcttagtgtggacccgatctgcctgggatgatagagggtgaaaattgacccctctgttcaaaaaaattgaactattcgaggggccatcaaacttacttagcgagagttactgtggagggagaggcttgctcaaatccgcgttcaaggatttccagattggtaagaacttcagattccttgacgtaatttggcgcaccgtgggtgatggtttgatacaacgcatcataaacgcgcccgtaatcgcccatctccggcttcatctcttctctgaccgtcacgccctcgtcattgacatactccagcacaccgacgctatcatccgctgcgaatcccggttcgcccggcataatattagccttcaggctggtttcctgctggtcgataccgtatttaataaagctacctttcttaccgtgaacgataaatttcggataatcgattttcaccagatggctggttttgacgatggctttcaggtcgccataaaacagttgcgcttcaaaggtgtcgtcaggattggctttattacgcaggctgcggatgtcataagcgacgtgatccgggcgaccgaacagagaaataatctggtccatcgtatgcacaccaaggccataaaacgcgccatcctgcggcagcccaggtttggtttctgccaccgggcggtaatagtcaaaatggctttccacttcaacaatctctcccaacttgccactttcaatcgcttttttcgctgtcaggaagcaggagtcaaagcgacgattctgatacggcgtgacggtcagccctttgcttttcgccaacgcaaacagctctttcgcctgcgcaagtgtcggagtgaacggtttttcgaccagcacatttttcccggcttccagcgcgcgtttcgcgtactcgaaatggctgtccgcgtgggtgcagacaacaaccagcttaacatcgggatcgtttagtacttcgtcgagatcgctggtgaaatggatatgggaataaatgggagcctgttcttccggcttcgcatggcgacgaaaaatatgcgcgacatgccagctatccttgcggttaagtacatacggcagatggtaacgggtggtgcttttgccgaagccaataaaggcgcagttgatgaccatgatttcgtcctttttaaggtggttatttacaccttagcgcaaagcggacgtggttcctactggagtgcgcataacgaacacaagcactcccgtggataaattgagaacgaaagatcaaaaaaaaagccagcacccggctggctaagtaatactggaagcaatgtgagcaatgtcgtgctttcaggttctccgcgagggtcttcctgatcgcgagacaataataatcattctcattcgcacttgtccaacactttttgcaaaaaaatgcatttgactcgcatttgaaagtcaatgatgttgaaagggacatttaccccaaagaggacaaaggaacaaatgctcttcccacgaagagggccgctaaccttagtaccccgccgttaaatcatccacgctgcgcgggtcggatgcgccgtacaactcaccgtccggcccaaccataatgctttgtgtactgcccatcgcctctttcagcgccactttctgaccttttgcttccagcagcttgagcgtatccgggctaaaccctttttcgacacgcagctcgtccggcaaccactgatggtggaaacgcggcgcattggtcgcttcggcgacgttcaagccataatcgatgctattcaccaccatttgcagcactgtagtgatgatccggctaccgcctgggctaccggtaaccagccaggttttaccgtctttcaccacaatggtcgggctcatgctgctcagcgggcgtttgttcggcccgacggcgttggcatcaccgcccaccagcccgtaaacgttcggtacgcccggtttggcggagaaatcatccatctggttattaagcagaataccgctctcgcccgcgacaatgcccgtaccgaaggtggtgttcagcgtataggtcaccgccaccgcgttaccatctttatccaccacactgtaatgggtagtttgattactctcataaggcgcaagcttgccggggcgaatttcgctggatggcttcgctttattgatatcaatttgatcggcaatagatttggcataggctttattggtcagcgcctgccacggtactttgacaaaatccgggtcgccaagatattcgctgcggtcggcgtaggcgtatttctccgcttctgccatgatttgcatcgcatcggcgctgccaaagccgtatttcttcatatcgaagttttccagaatattgaggatttgtacgatatggatcccgccggaggatggcggtggcatggagtaaacctgatacccgcgataatcgccgcttatcggagtgcgttcgaccgctttataggctgctaaatcttctttagtgatcaagccaccgtttttctgcatctcctgggcgatctgttccgcaatcgtgcctttatagaattcgtccgggccgttttcagcaatcatctccaggctctttgccaggttcgcctgcaccagcgtgtcgccctttttcagcggctcgccctctttccagaagatagctttactgttttcgtgattcggcaacacttcgctaccgtaggttttgagatcgtcagccagcgcgtcgttaacgataaaaccatcgcgtgccagtttaaacgcgggctgcacgactttgttcagcggcatggtgccgtatttatccagcgccaggctgaaacctgctaccgtacccggtgtgccggaagccagatggctagtgagactttttttgctgtccgggttgccctgatcatcgaggaacatatcgcgggtcgctttggcgggtgccatttcgcggaaatcgatagccgtggtattgccatttttgctgcggattaacataaaaccaccaccgcccagattccctgcctgcggatgcgttaccgccagcgcgtagcccaccgccacggcggcatcaacggcattcccgccctccttgagaatatccacccccacctgagtggcagtggcgtccacagacgctaccattccctgtttcgcgcgtaccgggtggaagacatcttcctccacaccatagctgacgggcggcgcaggaggcgcggcggcggcgctaaaacaacttccactgagcagagcagcaatggccacccggcgtaaaaacgtcggttttatcatcgttattctccagagattaaggggcaaccccagctaagcctggtatataactctgaattaatcatcgttttgtcgggaagcgagtaaacttaaaggatatcttcagaggaggatacgcgatgaaacgacttctgattcttacggcactcctgccgtttgtcggctttgcacagcccattaatactctgaacaaccctaaccagccggggtatcagatacccagccagcagcggatgcaaacccagatgcagactcagcaaatccagcaaaaagggatgctgaatcagcaactgaaaacgcaaactcagttgcaacagcagcatttagaaaaccagataaacaataattctcagcgggtgttgcagagtcagccgggggagcgaaatcccgcccggcagcaaatgctgcccaacaccaacggcgggatgttaaacagcaaccgtaatccggatagtagcttgaatcagcagcatatgctgccggagaggagaaacggcgacatgctgaatcagcccagcacgccgcagcctgacattccgttgaaaactattgggccgtaattattgggccgtaaagttcggaccaatcacgtcaatcgcatcggtacagatgcaatccacaccccagcgcagcaactctgctgcgcgctggggtttattgacggtataaaccagaatccgcagtccggcgtctttcaactgcatcactcgcgctttattgagtaacttatgattgagatgaatagagacgcagcccagccgcgcggtcagttcgcgccagtcgtcgcgccactcatccagcaacaaaccgcgcggcagttccggtgccgcctgttgtgcagcttctaaagcatcaatctcaaagctactcagcagcggcggcgtcataccggcccacagctcgcgtgccgccagcgccaccattttgcccgttaatggcccggtgccggtggtgggtttgatttcgatattcgccatcatcccgtgttcgcggcaacgttccgccacctggctaagcaacggtagcggctcacctttaaacattttgctgtaccaactgcccgcatccacgcgcagtaaatcctgccagttcagttcacccgcgacgccccagccgttgctggtacgttcgagattgtcgtcatggagcaggaagatctcgccatctttgcttaacttcgcgtcaaattcgatcatcttatgaccgtattttgccccgacgtcgatactcgccagggtgttttccggggccagcttaccgccgccacgatgagcgacgatgcggggataaggccagttactcatactcgttgtcctgtttcaccatcaaaaagatgcagctgattttccgccagatgcagccacagcgtgctgcctgccgtcgggcgctcctgatgcgccagtcgcaccaccagcttctgctcgccccagcgtccgtgcgccaggttatctgcgccgaggatctccagcgtgtccatcaccatcggtacgccgccttctgcctggctgcttagcgcaatatgttccgggcgaatgccgagagtcattttacgcccggcatactgacggtagccaccgtttagcggcagctcaataccgccgtccagttcgaaatgcgtgccttcgttattcacgcggcctgtcagcaggttcatcgccggactgccgataaaactcgctacaaacaggctggcgggcttttcgtagacttcaactggtgtgccaatctgttcggcaacaccgccgttcatcaccattactcgctgggcgagcgtcatcgcttcaacctgatcgtgagtaacgtagagactagtcgttttcaggcgacggtgcaactgttgcagttcaagacgcatctgcacgcgcagcttggcatcgaggttagagagcggctcatcaaacaggaacaccgccggatcgcgcacaatcgcgcggcccatcgccacacgctggcgctgaccgccggaaagctcgcgcgggcgacgtttgagcagaccgtccagctccagaatgcgcgccgcttctttaacgcgctcggcaatttgctgcttgcccatgccgcgaattttcagcccccacgccatgttttcttcgacactcatatgcggataaagcgcgtagttctggaacaccatcgcaatcccgcgatcttttggctccatttcagtcacgcgctggtcgttgatccagatatcgccttctgtcacccgctccagcccggcaaccatgcgcagcagcgtgcttttcccgcagccagacggcccgaccatcacgataaattcgccatccgccacatcaagggtcagcggtttaatgacctgggttttaccatcccagcttttggttactgcctgtaatttcagtcctgccatcttatttctcactatcgaccaggccgcgcacgaaggcacgctgcatcactaaaacaatcaccaccggagggataagcgttaacaacatcgccaccatcacactgttccattccgtggtgccttcgcctgtagcgatcatccctttgatccctgccacggtggtgccgagatccacatcggtaataatcaacaacggccacaaatactgattccagccgtagataaaggtgatcacaaacagcgccgccagattagttttggagagcggaaaaacgatgtcgcaaaagaagcgcattgggcttgcgccgtcgatccgcgcggcttccaccagctcatccggcagcgtcataaagaactggcggaacaggaaagtagcggtcgcgctggccatcagcggcagcgttaaaccggcgtagctgtcgagcatctgcaggttggcgatgacttccaccgtcgggaagatacgtacttcaaccggcagcatcagggtgataaaaatcatccagaagaagaggttacgtagcggaaaacgaaaccagacaatggcaaatgcgctgagcatgctgacggtaattttgccgagcgtaatgctgaacgccatcacaaagctgttaagcaacatccgccagaacggcgcgctattcgtgcctaccccgttcacccagatgttgtggatgttttccagcagatgtgtgccggggatgagcgtcatcggcgcggcatagacggcctgtttatccagcgtcgccgcgacaaacgccacgtacagcgggaagaggatcaccgcgatcccgaggatcagcatggtatggctgaatatcgtcagccacggacggttctcaatcattggtaacgcaccttgctttcaacatagcggaactgcaccaccgtcagcacgatgacgaggaacatcaacaccacgctctgtgcggcagagctagccagatccagtccggtaaaaccttcgcggtagatcttataaatcagcgtcgtggtggcctgaaccggcccgccggacgtggcggcgtcgatcaccgggaaggtgtcgaagaaggcatacaccaggttcactaccagcaggaagaaactcaccggggcgataagcggcagcgcaatcttaaagaagcggcgaatcggccctgcaccgtcgatggctgcggcttcgatcaagctacggggaatggattgcagcgcggcatagaagaacaggaagttgtagctgatttgcttccatacactggcaaacaccaccagaaacattgcctgaccgctgttttgcgcgtggttccagtcgtagccgaactccgcgagaaaatgggtgatcagcccgcgaccggggttaaacaggaagatccacaatacggcggcaacggcgggagccacggcgtaaggcagcaacattaaggtttgatagaaacggctgccgcgcacgatgtactccaccagcgccgcaaagaacaggcttaccagcaaaccgctgacggtgacaaaggtgctgaattttatcgtcgtccagaaggagtcgagatagtagctgtcatggaacagcgtgacgaagttatccaggccgacaaactggctggagaaaccaaacggatcgacgctttgtaggctgtaccacaacgcttcgcccgcaggccagataaaaaagataacggtgatgatgagctgcggcgcgaccagcagataaggcagccagcggctgcggaacaccggacgggaactactcattacggttgattcctgaactgtgccggatgcgcttcgcttatccggcctacacgcgatgccaggtcagataagcgaaacgcatccgacattacactgattaagacttcgtgcttttctcaaagcggcgcagcaactgatttccacgctcaacggcggtatccagtgcctgctgtggtgtcttcttaccggtccacacgctctccagctcttcatccacaatcacgcggatctgcggcatgttgcccagacgcagccctttggtgaacggcaacggcggcttattcagcatctgacgcgtcgcggtatccgcccctgggtttttctcataaaagccctgctcacgggtcaggtcatacgctgctttggtgattggcagataaccggttttctgatgccactcggcagcgttttctggcttcgcgaggaaatcgaggaacttcgccacaccggtatacgtttctttatctttaccctgcatcacccacaggctggctccgccgataatggcgttttgtggcgcatctttcgcatcggcgtcgtaaggcatcatgcctacgccgtagttaaatttggcgtactcgcgaatgttggcaagagaaccggaagaggcggtggtcatcgcgcaatcaccgttatagaacttctcggtggattcatccttacgaccgacgtagctgaagtcgcccttcttgttcatctcctcgagcatggcgatgtgtttcacctgctccggcttattgaactccagcaccgcgtccgtgccgtcaaagccgttgtttttgctggcaaacggcagaccgttccaggcgctaaagttttccagttggatccagccctgccagccgctggcgtagccgcacttcatgccggaggctttcagtttcgcggcatagtccgccagatcctgccaggttttcggcggctgttccgggtctaatcctgctttcttgaaggcgtctttgttgtaatagagaacgggggtgctgctgttgaatggctgggagagtaagtggcccgttttgctgtcggagtagtaaccactaaccgtcggcacaaactggctctcatcgaactgaatccctgcctctttaaacacgtcatacaccggtttaatggctttgctcgccatcatggtggcggtgccaacttcataaacctgcaaaatagccggcgcgttgccggtacgaaatgcggcaatccccgcgcttaaattctgttcgtagttgcctttataggtcggtacaattttgtaatccgggttttcggcgttaaaacgttgggccagagaatccacctctttacccagttccccttccatagaatgccagaacggaatggtcgtcactgcctgtgcattccccattaacgccagtccgagcgccagtgcactagctgtataatgtaacggtttcatcgtttatctctcttgttgtaccgaatgcgcgaattcacgcgttttatgctcgcggggtaacatgacatgctcgaattacagaaaaataacttttttgttacatttgtaagatagtaaggtgtcagaaagatgacaaggcggtgacggcgtgggtgagggaaaatgggagatggggcacggataagcgggaaaatatagaaggtctgaatcaaactctacagattgctcatcgtttcatgccggatgcggcgtaaacgccttatcaggcctacaagatcgtgcaaattcaacatattgccactcacccagtaggcctgataagcgcagcgcatcaggcaattttacatttgtcacctgtctcaaaggagtcttttgactccctatcaatcaacgtgttattacccgcctaaatacgcacttctcaccgcttcattcgccagcagcgcatcaccagtatcggaaagcactacatggccgttttccagcacgtagccgcgatccgccagctttagcgcctggttggcgttctgctcgacgagaaagatagtcatcccctgctcgcgcagctgctcgatggtgtcgaaaatttgctggatgataatcggcgcaagaccgaggcttggctcatcaagcagtagcaaacgcgggttgctcatcagcgcacgaccaatcgccagcatctgctgttcaccgccggacatggtgcccgcccgctgaatacggcgctcatgcagacgtggaaacagctcatacacccactttatgcgctcctggaactggtcgcgttcagcaaaaaaaccgcccatcgccaggttctcttccaccgtcatccggctgaagacgcgacgcccttccgggacaatcgccaccgcttcgcgcatgattttcgctgtctgccagtcggtaatgtctttatcatcaaacacaattcgcccgctggtggcacgcggatcgccgcataacgtgccgagcaaggtggttttccccgccccgttcgcgccaatcagcgtgacaatctcgccctgattgatatgcaggctcacctcatgcagcgcctggattttgccgtagtgggcgctgactttgtcaaaggacaacatgactttttccatcttatgcctcacctaaataggcacggatcacgtccgggttattacggatctgctccggcgtaccgtttgccagcggcgtcccctgattgaccacgtaaattcggtcgctaattcccatcaccagcttcatatcgtgttcaatcaacaagatagtggtgttgtgatgattgcgcagttcggcaatcagctcatccagctctttcgtctctttcgggttaagacctgccgcaggttcgtcgagcattaaaatctccggctgcgtcaccatgcagcgggcaatctcaagacggcgctggtcaccataggccaggttactcgcctgacggttggcgtgttccagcaaaccaatgcgctcaagccaggtcgcggcgcggtcgagcgcttcgctctgggcgcgacggaaggatggcgttttcaacaggccagagaacagcccggttttcagttgctgatgctgcgccaccagcaggttttcaattaccgtcatttcacggaacagacgcacatgctggaaggtgcgcaccacgcccatgcgggcaatttgctgccccggtaaaccttccaggtgctgatcgcgcagtaaaatggtgccgccggtgggtttgtagaatccggtcagacagttaaaaaccgtggtttttccggcaccgttagggccgattaagctgacgatctcctgcgggtacagttcaagattgacgttgttcaccgccagcaggccgccgaagcgcatcatcaggccgttaacagataataatggctgactcatgcctgctctcctttcgctgcgccgtttttcagcttcagttgcgggcgcgtcatgggcagcaagccctgcggacgccagatcatcatcagcaccatcaaaccaccgagcattaacatgctgtattcgttgaaatcacgcatcaactcgcggctcaccaccagcaaaattgccgccagaatcaccgcaaattggctgcccataccgccgagcaccactatcgccagcacaaacgcgctttcggcaaaggtgaaggattccgggctgacaaagccctgacgcgccgcaaacagcgttccggcaaaaccggcaaacgcggcacttatggtaaaggcagtcagcttgatacgacgcgggcttaagcccaggctacggcaggcgatttcatcttcacgcaacgcttcccacgcacgccccagcggcatccgcagcaggcggttaatgacaaacaggcttagcaccaccagcagcaacgccaccaggtagaggaagatgacacgatcggagggatcgtatttcaggccaaagaaattactgaacgtgtcccagccgccttcacgagcggtacggctgaactcgagtccgaagagtgtcggtttcgggatctgactgattccgttcgggccgccggtaatttcggtgttattgagcagcaatatgcgcacaatttcgccgaaaccgagggtaacgatcgccagatagtcaccgcgcaaacgcagcaccggaaaaccgagcaggaagcccgccgccgctgccattaatccagcaatcggcaggcaggtccagaagcccaagccgtaatagtgattgagcagcgcaaaagtgtaagcgccgatggcgtaaaaaccgccgtaccccagcaccagcagaccagaaagaccaacaaccacgttcagcccgagaccgaggataatgtagatcatggtcagggtggcaatatccaccgtcccgcgactaaccataaacggccacgccaccgcaagcaccaacagcgccacgaggaacagtttctgcttcaccgtggagccatcaatggcgggcagaataaacttcggtccggaaacgcttttcaaccctttctggaaagccggtcgcaaaagctggaagaaaaagaccaccgccgtgccgataaacacccactgccaacggacatcgctagccgtgtcgaccaccagtttggtgccatccagctccagttgcacgcccataaagacgcccgccagcacaaagaacatcgcggcagagagcagcgccattgcaatatgcatcggtttcatactttctctacctccgggcgacccagaataccggtcggcatcaccagcagcaccagaatcagcagggcgaaactgaccacatctttatattccgtactcagataggcagaagagagcgcctccgcaatccccagaatcaggccgccaatcatcgctcccggaatgctgccaatcccaccgagcaccgccgcggtaaaggctttcatcccggccataaagccgatgtaggggttaatgacgccgtagaactgaccgagcagcacacccgccaccgccgccatcgccgcgccaatcacaaaggtcagcgcaatcacccggtcggtgttaatgccaagcagactcgccattttcagatcttccgcgcaggcacgacacgcgcgacccatgcgggaatagcgaatgaaaatcgtcagcgccagcatggcgaggaaggtaacaatccagatcaccgcctgcatggtggtaatagaggcagagaagttttcgctatgccccaccacccactgaccgttaaacaggctcggcagcgccacgtcgcggctaccttcggtcaggctgacgtagttttgcaggaagatggacataccgattgcagagatgagtgcaatcaggcgcttagagttacgcaccgggcggtaagccacccgttcgatactccagccgtaggcgctggcaatgacgattgcgccgacgaatcccgcagctaccagcagccagccggtatcaatgcccatcatcatcagcgcggcgatgatcataaaactgacgtagctgccaatcatataaacctcgccgtgggcgaagttgatcatgccgataatgccgtaaaccatggtgtagccgatggctatcagcgcgtaggtactgcccagcgtgacgccgttaaacatctgctgcaagaaatacaaaaactgctcagacataaggtaacctttctaaacccgcccgcattttacgggcggtgggatgatcacttggctgccgtggaactaccgtcggcgtgccactggaagacaccaaaatcaaatcccttaagatcgcctttttcatcccagttcagcggcccaatcacggtgtttgcaccgttagcttttaaatctttcaccagcgccagcggctcatcgctgccggtacgctcaagggcagtcgccagagattgcaccgccgcgtaggtgatccagacataaggcccggacggatctttcttgtctgctttcagcgcatcaacgatgccctggtttgccggatcctggtcatagcgttttggcatagtgaccaacatgccttcggcggcatcaccggcaatgttgctcaagctcgcattacccacaccttccggccccataaactgggttttcaggccaacggaacgggcctggcgcagcatctgccccatttccgggtagtaaccgccgtagtaaacgaagtcgatgttttcttttttcaggcgggcgatcagcgcggagaaatctttctccccggcggtaataccgtcgaagaagacgacgttggcgttagccgctttcagcccgtcctgcacgctacgcgccagcccttcgccatactgttgtttgtcgtgaatgatggcgatgcgctggggcttcaccgtctcaagaatgtattttgccgccgttggcccctgggaagagtccagcccggcagtacgcataatgtgttgataaccgcgttgggtcagctccgggttggtcgctcccgggctgatcatcagaataccttcgtcttcatagatatcactcgcaggctgggtagaagaagaacacagatgaccaataacgtatttaatgccgtcattaacgattttgttggcgaccgcaacggcttgtttcgggtcgcatgcgtcgtcatattccacgccaaccagtttatcgcccttaattccccctttggcattaatgtctttaattgcctgacgcgcgccgttaaattccatatcgccccactgggcaatcgggccggacatcgcgccgacaacggcgactttaatatcgtcagccatagcggtgtgactaattgccagtgcaatcatccctgcgatgatagttttcgcattccgtttcatagtcaaaaatccccattcgtgatgttgtgttgctttgtttttatgtgttaacaaatcagactgttctttttttatactgcactgtttttgcctgtctgattaaggggttagcgcagtattttgtgataatagcgattaaaatccctatttttcagtcgattaagaacagataatattctgaatttattgatagataaacagaaaaaagtgcctttgtcagcataaaataacggcacaaagggcggaataattcactatcattcaggggattatgctggacatttttcattctctaatgttttaattttgtaattattgctgttaaaaaattaatcacctgccaaaagaaataaaaaagagaaagcctccgattaaattatttcgctacactggttccacttttgtgatttacacgggttacccatgaagctgaccatcattcgattagaaaaatttagcgaccaagaccggattgacctgcaaaagatctggccggagtattccccttccagcttacaggttgacgataaccaccgtatctacgccgcgcgttttaacgagcgcctgctcgctgccgtgcgggtaaccttaagcggcaccgagggagcactggattccctgcgcgtgcgggaagtcacccgccgtcgcggtgtggggcaatatctgctggaagaggttttgcgtaacaatcctggcgttagttgctggtggatggcggatgcaggcgtggaagatcgcggtgtgatgacggcgtttatgcaggcgctggggtttacggcacaacagggcggctgggagaagtgttaatcgtcaagtttgatttcaaaagtgatattgcctgatgcgctacgcttatcaggcctacaatgtgtgttgcaatttactgatttctttggatcttgtaggccggataaggcgtttacgccgcatccggcatgaagcaacgtactcgatattagcaatttggcggcaacccaaagttgccgattaatgattacttcgcatcggtcgccgtgccgttggcgtgccagtcaaatacgccgaactcaaagcctttcagatcgcctttctcatcccaggtcagcggtcccattacggtatccacggagttcgctttcaggtatttggcgatttcagccggatcgtcagactgattcaggcccgcctgcaaagattgcagcgcggcgtaggtggtccaaacgaatgcgccacttgggtcctgttttttcgctttgatcgcgtcaacaatgggtttgttcgccggaacctgatcgtagttcttcggcttggtcaccagcagcccttccgcactttcgcccgcaatgttagacaggctaacgttagccacaccttccggccccataaactgagttttcagccctgccgcgcgtgcctgacgcaggatttgccccatttccgggtgataaccgccgtagtaaacgaagtcgatattctcttttttcagacgcgccaccagcgtactgaaatctttttccccggcggtgatgccatcaaagaacaccacgtttgcattgcctttcttcaggccgtcctgcaccgctcgcgccagaccttcgccgtattgctgtttgtcgtgaacgatagcaatacgctgcggtttcactttctcaagaatatatttcgccgccgtcggcccctggtcggagtccaggccggtggtgcgcaggatcagctgatagccacgggcggtcagctccggcgcggttgccgctggggtgatcattaaaatgccttcgtcttcgtagatgtcagacgcaggctgcgtactactagaacagaggtgaccaatcacatatttaatgccgtcgttaacgactttgttcgccaccgcaaccgcctgtttcgggtcacaggcatcgtcatattttacgatttgcagtttgttgcctttaatgccgcctttagcgttgatatccgcaaccgcctgctctgcgccggtaaactcctggtcaccgtactgcgcaaccggaccggacattgcgcccacgaccgcgactttaatatcttctgccagagccatattgctgaatgccagcgcgatacatcctgccagtaacgctttaccctttatgttcatcctgagaatccccattcttctggttattacgtgtgttgtgatgttgtttttcagcactttatttcgttttatgcatgactacccgtgctttagcagcatactctgctaaaacatacccgatttttatgatattggaatagctattttgacagtttattaacaatctgcgtggggattggcgttttgccggaggggaaattgattattacagaggcccaaaaaacaaaaaccccggactctcatccagggttctctgcttaatagcggaaattacgcttcaatggcagcacgcaattttttcatcgcgttcttttccagctggcgtacacgctcagcggaaacgccgtaacggtcagccagttcctgcaacgtggacttgttgtcttcgtccagccagcgcgcacggatgatgtcctggctgcgttcgtccagaccctgcatcgcgtcggtcagacggtttgccgcctgctcttcccagttatcatcttcaatgccgtcggcaaagttagaacttttatcctgcagatagagcaccggagccatcggctggctgtcggaatcgtcgtcggaagacaggtcaaaggtcatgtcctgtgccgccatacgactttccatctcacgtacgtctttgctggttacgcccagttcacgggccaccatttcgacttcatcctggttaaaccagcccagacgctgcttggttttacgcaggttgaagaacagtttgcgctgcgctttggtggtcgcaactttgacgatacgccagttacgcagaacgtattcgtggatctctgctttgatccagtgaacggcgaaggagaccaggcgcacacccacttccgggttgaaacggcgcactgctttcatcaggccgatgttaccttcctgaatcaaatccgcctgtggcaggccatagcccgcataattacgagcaatatgaacaacaaaccgcaggtgagacaggatcagcgttttagctgcttccagatcgccatggtaatgcagcttttcagccagcgcccgctcctcgtcagcgctcaacatcggccacgcgttagctgcccggatgtaggaatccaggttgccaactggggctaaagctaaactttgcattttgtcagtcattcaaatcctctcaatcgatatcttctggcgcttcagtggtagcaacaactgtgccagagcttaagagcaacgaggttatcattcactgttttatcagaccgtgattttatccacaagttcaatgcaagcttgtgaataaattacgcacaaaatgtgacatagagatgaaataccgggaagagacaacggggtctctttccctgctacggaacccattgcagggaaagagtataacacgcttttattattcaggcgtaaagtggcgtaaatgttgtaccgtggcaagccacgctgccacccagccaatcatgctgcataccagcagcaatagcaggcattcatcgaaacttaagccattgatatcaaacttcgttccgaaaacctgtgccacttccgcaaccgcgctactcaatcgcagcaccagaatttcactcaaaattaaactcaacaatgcgccagaaaatcccagcagtgcgccaccatacaggaacgggcgcaggatgaatccatctgtcgcaccaatcagtttctgtacgttaatggagtcacggcgagcaaagatactcagacgcacactgttaccgatgacgaggaacacggccgccaccatcaacacgccgatcatcgcgctaacgcgcccgaccagcccggtcaacgccgccagacgggcaaaccagctgtcatccatccgcacttcgtcaatgccgttaatctgcgtgatacgatcacgcagcgtattcagactttccgtcccctggaaatcgagtttcgggatcaccaccgccactgccggaagcgggttttcttccagcatatccagcgcaccaccaaaaccagaccagttacggaactcacccagtgcgtcttcacgagaaagatagttcactttctccacgccttgctcggcctgcaactgtgccaccacgcccgcagcagcgtcatcgtccagcgttttttgcagataaacagtgatttgcggactcggataatactgcgtcgccgcctggttaacgtttttgtacaccatataacagacgctgggcagcgtcagagaaatggcgataaccatcaccgttaaaaacgtggcgaacggtttgcttttcagatcctgcaatgcgccgtggaaggcatagcgcacctgttcgttgaaaacgttggttttgcgatttaccggttttgggctggatttcgcgcgttttggtgcgttacgaccgccgtcgccactgccgccgacgcttttacggaagcgatcaagacgcccgccaaactgccgaatatgattgattgcatcgcgcttattcatggcccacgcctccatgcaagtgaccatcgctcagggtgagcatgcgataggaacgccggctgatcaggttgatgtcgtgcgttgccatcaatacggttaccccaacgcggttaaactcttcaaacagacgtaaaatgccttcgctcagcgcgtcgtccaggttaccagtcggttcgtccgccagcagtaccgcgggcttgttcaccaccgcgcgggcaatgccaacacgctgttgttcaccgccgctaagctgaatagggaagttcttcgctttgtccagtagcccgactttatccagcgccgcgctcacccggcgacgaatatcgtcaccgctggcaccggcgataatcagcgggatcgccacgttatcgtagacagtacggtccatcagtagatggtgatcctggaaaatcatgccaatctggcggcgcagaaacggaacttcacggtttttcagacgcgtgatgtcatggccgctaaaccagattttcccggcgctgggccgctcaatcccacagatcagcttcaggagggtacttttccctgcgccggaatgaccggtcagaaacgccatctcacccggctgcatatggaacgtaacgccctgcagcgcctgtctcccaccgagataagccttgctgacatgttcaaagcgaatcattgttaatcctctcgggcaaaaagtgcctctataaagtcgtccgccttaaacggacgcaaatcctcaatacgttcgccgacaccaatgtagcggatagggataccaaactggtcagccacgctgaaaattaccccgcctttcgccgtgccgtccagtttcgttagcgtgatgccggttaagccaacggcttcatggaacagtttggcctggcttaccgcgttctgcccggtgctggcatcaatagtcagcataacttcatgcggcgcttcaacgtcgagtttcttcatcacgcggacgattttcttcaactcttccatcaggtggcttttgttctgcaggcgtccggctgtatcggcaatcaggacgtcgatattacgcgctttagctgcctgaatggcgtcgaagataacagaggcggaatccgccccggtatgctgggcaatcaccggaatattgttgcgctgaccccagacctgaagctgttcaaccgcagctgcacggaaagtatcacccgccgccagcatcacgcttttaccctgctgctcaaactgacgcgccagcttaccaatcgtcgtggttttacccacaccgttgacgcccaccatcaggatcacaaacggcgctttgccttcaacattcagcggctcatcgactttcgccagaatctcgcccatctcttctttcagcaggccatagagcgcctcggcgtcacgaagctgcttgcgggatgcgccttccgtcagattggtgataattttacgtgtggtttccacacccacatcggcgatcaaaagctgctcttccagctcctcaaacagatcatcgtcgatttttttaccgcggaacaggctgataaatccggaaccgagattttctttggtttttaacaggctgcgtttcaggcgcgcgaaaaaaccttctttggtcggtttttcctgctcctgagcgatttcttccaccggctgctcttcttctgccggaggaaccaccatcaccgcctcttctgccgcttcggcagccagcgccgtttccagctcttcgtcggtaatttcttctttagccgcttcttcttccgccgcttcgacaatctctacggtttccgcttcagcctgccactcttctgggctaaccgcttcggcgttgacgtcttccggcaacggcagctcttcacgttcgatagccactggctccggcgtttcttctacgaccggttccggctgtgcaacgacttccgcttcaggctgcgctttttcactttcagcaacctgttcagtgacttccacaacgtcggcagcaaaagtttccgcctcggcttcagtatgcgcttgcggctgctcttcaacggcttgttcagaggccttcacaggctcttgcgcctgaacgatttcttctacaaccggttgttcattctgaacttctgtctctttttccggggtctgctctttttgaccaaagcccagccaggaaaaaaagccacgttttttttctttcgccatttgcgactacactcctcgctgttgcttcatggcacagcgttaacgctatgtacatagcagctaaaaaaatgatgaaatagtctatcacttaacttaattcacatcaccgcctgcaagtatgtgttatctggcggattgagcaatttatcatgaaaaaaccgaatcattccggcagcggccaaatccgcattattggcgggcagtggcgaggccgtaaactcccggttcctgatagcccaggtctgcgccccaccaccgaccgcgtacgcgaaacgttgtttaactggctggctccggtcattgttgacgcccaatgtctggattgcttcgccgggagcggcgcgctggggctggaagcgttaagccgctacgctgcgggggcaacgttgattgagatggatcgcgcggtttctcagcagttaattaagaatctggcgacactaaaagcaggcaatgcacgcgtggtgaacagcaacgcgatgagtttcctggcgcaaaaaggtacaccgcataatatcgtgtttgtcgatccaccgttccgccgtggcttgttagaagagacgataaatttactggaagataacggctggctggctgacgaagccctgatttatgtcgaaagcgaagtcgaaaacggtctgcccactgttccagcaaactggagtttacatcgggaaaaagtggcgggtcaggtggcttatcggctgtatcaacgcgaagcacaaggagaaagtgatgctgattaatattggtcgtttgttaatgctctgcgtttggggatttttaatcctcaacctggtgcatcccttcccacgcccgctgaatatcttcgttaacgtggcgctgatttttaccgtgctgatgcatggtatgcagctggcgctattgaaatccactttaccgaaagatggcccgcagatgaccaccgccgaaaaggtacggattttccttttcggcgtgtttgaactgctggcctggcagaagaaatttaaagttaaaaaataaccttattgttcgcctacaaagctgacaaagcgcgttcctttatagctcagcgtacctttatcgcccactgtcagggcgtggtactgctgggcgtcgaggcgaaacgtctgctccattcctccgctttgcggtttgaagcttgcctcatagcgtatactggtgcctgccggagtcacttcctgctggcggctacggcgatcgttaatcggtttttcccgcttgttgctcaccaccaccagcttttgctggagcggagccatatcattatcagctttttcccgtcgctgttgcataaaacgaaagcttgcggcgacgacaattaagccaatgataacaataaagaaaagaggtggtttgctcatctttatccctcatcggaaaatgcggaaataagcataccctgccagttatggtgttgtcatccgtccaccctcgccactaaactggaagcaagaccgtaggcattccgcttacgaaaaaataacgaattcaaggaactaagatgctttggagctttatcgctgtctgtctttccgcatggctatctgtggatgcaagctatcgtgggccaacctggcaacgctgggtgtttaaaccgttaacccttcttctcctgctgttactggcctggcaagcgccgatgttcgacgccattagctatctggtgctggcagggctgtgcgccagtctgctgggcgatgcgctaaccctgttgccacgtcaacgtctgatgtacgccatcggcgcgtttttcctcagccacctgctgtacaccatctatttcgccagtcagatgacgctctctttcttctggcctctaccactggtgctgctggttctgggtgcgctgttactggcgattatctggacgcgcctggaagagtaccgttggcctatctgcacgtttatcggcatgacgctggtgatggtgtggctggcaggtgaactgtggttcttccgtccgaccgctccggcgctctctgcgtttgttggcgctagcttgctgtttatcagtaactttgtctggctggggagccactatcgccgacgcttccgtgcggataacgcgattgctgcggcctgctactttgccggtcacttcctgatcgtccgcagcctgtatctctgataaaacttgactctggagtcgactccagagtgtatccttcggttaatgagaaaaaacttaaccggaggatgccatgagcactcctgacaatcacggcaagaaagcccctcaatttgctgcgttcaaaccgctaaccacggtacagaacgccaacgactgttgctgcgacggcgcatgttccagcacgccaactctctctgaaaacgtctccggcacccgctatagctggaaagtcagcggcatggactgcgccgcctgtgcgcgcaaggtagaaaatgccgtgcgccagcttgcaggcgtgaatcaggtgcaggtgttgttcgccaccgaaaaactggtggtcgatgccgacaatgacattcgtgcacaagttgaatctgcgctgcaaaaagcaggctattccctgcgcgatgaacaggccgccgaagaaccgcaagcaagtcgcctgaaagagaatctgccgctgattacgctaatcgtgatgatggcaatcagctggggtctggagcagttcaatcatccgttcgggcaactggcgtttatcgcgaccacgctggttgggctgtacccgattgctcgtcaggcattacggttgatcaaatccggcagctacttcgccattgaaaccttaatgagcgtagccgctattggtgcactgtttattggcgcaacggctgaagctgcgatggtgttgctgctgtttttgattggtgaacgactggaaggctgggccgccagccgcgcgcgtcagggcgttagcgcgttaatggcgctgaaaccagaaaccgccacgcgcctgcgtaagggtgagcgggaagaggtggcgattaacagcctgcgccctggcgatgtgattgaagtcgccgcaggtgggcgtttgcctgccgacggtaaactgctcagtccgtttgccagttttgatgaaagcgccctgaccggcgaatccattccggtggagcgcgcaacgggcgataaagtccctgctggtgccaccagcgtagaccgtctggtgacgttggaagtgctgagtgaaccgggagccagcgccattgaccggattctgaaactgatcgaagaagccgaagagcgtcgcgctcccattgagcggtttatcgaccgtttcagccgtatctatacgcccgcgattatggccgtcgctctgctggtgacgctggtgccaccgctgctgtttgccgccagctggcaggagtggatttataaagggctgacgctgctgctgattggctgcccgtgtgcgttagttatcagtacgcctgcggcgattacctccgggctggcggcggcagcgcgtcgtggggcgttgattaaaggcggagcggcgctggaacagctgggtcgtgttactcaggtggcgtttgataaaaccggtacgctgaccgtcggtaaaccgcgcgttaccgcgattcatccggcaacgggtattagtgaatctgaactgctgacactggcggcggcggtcgagcaaggcgcgacgcatccactggcgcaagccatcgtacgcgaagcacaggttgctgaactcgccattcccaccgccgaaagtcagcgggcgctggtcgggtctggcattgaagcgcaggttaacggtgagcgcgtattgatttgcgctgccgggaaacatcccgctgatgcatttactggtttaattaacgaactggaaagcgccgggcaaacggtagtgctggtagtacgtaacgatgacgtgcttggtgtcattgcgttacaggataccctgcgcgccgatgctgcaactgccatcagtgaactgaacgcgctgggcgtcaaaggggtgatcctcaccggcgataatccacgcgcagcggcggcaattgccggggagctggggctggagtttaaagcgggcctgttgccggaagataaagtcaaagcggtgaccgagctgaatcaacatgcgccgctggcgatggtcggtgacggtattaacgacgcgccagcgatgaaagctgccgccatcgggattgcaatgggtagcggcacagacgtggcgctggaaaccgccgacgcagcattaacccataaccacctgcgcggcctggtgcaaatgattgaactggcacgcgccactcacgccaatatccgccagaacatcactattgcgctggggctgaaagggatcttcctcgtcaccacgctgttagggatgaccgggttgtggctggcagtgctggcagatacgggggcgacggtgctggtgacagcgaatgcgttaagattgttgcgcaggagataaggcaaaccgatcgcaacattgagcgcgatcggtcccctcgcccctctggggagagggttagggtgaggggaaaaggcggcatcgaagccaatcagcccctatcaaccgcctttacgaatcaaataacgataaggcagtccatccgtctctttagcaaccagttcgtgttccataaaggtacaaaacccaggaatatcgcgggtagtggccggatcgtcggcgataatcagcaacgtttcgccaggctgcatattgcgcacggttttgcgcaccatcatcaccggttccgggcagcgcaggccaagcgcgtcgagtgtgtggtcagggctggaaaagagatcggtcattttcttctcatcacttaaaaaaacggcgctagtttacgccctgtgagtccgtaagcaaactaggttaacgattgcgtgaaaattaaccattgcattgtcaacgtaaagcagtatcatgcggcggctcgaaaaaagggtaagcacgttattatgttaaggtaacagacgtgtcgtacgtattgggttccctcaccccaatggttaatcaaaaaggtacaatatgaacgttttcagccaaactcaacgctataaggcgttgttctggttaagcttatttcatctgctggtgatcacctccagtaactatctggttcagcttcccgtctccattttgggtttccataccacctggggcgcgtttagctttccgtttatttttcttgctaccgacctgaccgtgcgtatttttggcgcaccgctggcccgacgcattatcttcgcggtaatgatccctgcgttattaatctcctacgtcatcagcagcctattctatatgggttcctggcagggattcggcgcactcgcccacttcaacctgtttgtcgcccgtatcgccaccgccagtttcatggcctacgcgctggggcaaatcctcgacgtgcacgtttttaaccgcctgcgtcagagtcgccgctggtggctggcaccgacagcgtccacactgttcggtaacgtcagcgacacgctggcctttttcttcattgccttctggcgtagcccggatgcctttatggctgaacactggatggaaatcgcgctggtcgattactgtttcaaagtgttaatcagtatcgttttcttcctgccaatgtatggcgtattactcaatatgctgttgaaaagactggcagataaatccgaaatcaacgctttgcaggcgagttaaaggttcgttatcagagttgtgataagatggatgaatgagccgttatggccgtttatcgaaaggaagaagtcaatgcgcaatctggttaaatatgtcggaattggcctgctggttatggggcttgcggcctgtgatgataaagacactaacgctacggcgcagggtagcgtcgcggaaagtaacgctaccgggaatcccgtcaacctgcttgatggcaagttaagtttcagcctgccagcggatatgaccgaccagagcggtaagctgggaacgcaggccaataacatgcatgtctggtccgacgccaccgggcagaaagcagtcatcgtcatcatgggcgatgatccgaaagaagatctggcggtgctggcgaagcgtctggaagatcagcaacgtagccgcgatccgcagctgcaagtggtaaccaataaagccattgagctgaaaggtcacaaaatgcagcagttagacagtattatctccgcgaaaggccagacggcgtactcttccgttattctgggtaacgtgggtaatcaactgctgaccatgcaaattacgctgcccgctgacgatcagcaaaaagcgcagaccaccgcagaaaacatcattaatacgctggttattcagtaagttttaagaactactggcggcctcagggacgtgttccggaggccgtttttttaatcgccacgtcagtaataacgcgattgcgaccagtcccgccgccgccagataaatcaccggtacgcccgcccagctcatcaccagcccagccagtggtccagtcacgccaaggcttaaatccataaatacggtgtaagttgccagcgccgccccctgattttgctgcggaaccgcttttaccgccactacacccaatgccgggaacaccaggctaaacccggcccccgccagtaagacgccgattttcgccatccacggcatagtcgccacgccaaccagtagcaggccgattatctcaacgctaaagcaaatcatcgctacgtttaagccaccgatacggttaatgccgttagggaataacaaacgcgtaccgacaaacgcacagctaaacagcgtcagcgcgaaagccgcaccgtcccaacctttagcgtcataaaacagcgtgataaaggtggcgatgacgccaaatccggcggaagccagtgccagcgccataccgtacagccagacgcgcccaagcaccgcgcgaaacggcagcggtttgcctttactggcttttaccgtcggacgcgggatcgccaacaaaatggccaccagcgccacgcccataatgattaacgctaacgcctgcaagccgccccagtgataaaacacgacgcctaacggcgcacccatcgccatcgccccgtaagtgacaatgccgttccagctaatcacccgcccgatatgcaggctgccaaccacgccaacgccccatagggtgcttcccgttccggcaaaactttgcccaatcccaaggatgacgcgccccaggcaaagtaataacaggctgatgacaggcagactggcggttaatcctgccgtcagataccccagaccgctcaaaaagcagccgcataaaccgaagacgacaatctttttgggtcccaggctatcggcgtaacgtccggcatgagggcggctcagcaaggtggcgaaatattgcaggctgataaccaatcctgcccagaaggcgctaaagcccatcacatcatggacatagcccggtaatacagcgagcggcaacccgatggtgaggtagctggcgaagttaaacatgactatagagacaatgcgcaaattcaggcgcaatccgtttagcgcgggttcggctacgggttcgggcatgaggatcaccacatttttacaacagtgtttcatttttaccacgtgctgacgtgaaaatcagcagtaagaatcagaatattgctggcgtgactcccgctacacttaatacaaaaagtcacaaggaagccccaatggaaacccctcaacccgataaaacgggcatgcacattctgctcaagctggccagcctggtagtgatcctcgcgggcattcacgcagcggcagatatcattgtgcagctgttactggcgctgttttttgccatcgtcctcaacccgctcgtcacctggtttattcgtcggggagtacaacgccccgttgccattacgattgtagtggtggtgatgctgatcgcactaaccgcgctggtcggcgtactggcggcaagctttaacgaatttatctctatgctgccgaagtttaataaggagctgacgcgcaaactttttaaattgcaggagatgttgccttttcttaatttgcatatgagcccggagcgaatgctgcagcggatggacagcgaaaaagtggttaccttcaccacagcgctaatgaccgggctttccggggcaatggcgagcgtgcttttgctggtgatgaccgtagtttttatgctgtttgaagtgcgccacgtcccttacaaaatgcgttttgcgctgaataatccacagattcacatcgcgggattacaccgcgcacttaaaggcgttagccactatcttgcattgaagacgctactcagtttatggacaggtgtcatcgtctggctggggctggagctgatgggggtgcagtttgcgctgatgtgggcagtactggcgtttttgctcaactacgtgcccaatatcggcgcggtaatttccgccgtaccgccaatgattcaggtgctgctgtttaatggtgtttacgaatgtattctggtcggcgcattgtttttagtggtccatatggtcatcggcaatattttagaaccacggatgatgggccatcgcctggggatgtccaccatggtggtatttcttagtttgttaatttggggatggctgctcggcccggtagggatgctacttagcgtgccattaaccagcgtgtgtaaaatctggatggaaaccaccaaaggcggtagcaaactggcgattttactggggccgggcagaccgaaaagtcggttaccgggatgaggcgacaagtgatacgatacgcactttcattttccattaaacgttggccctgatatgtatcggatagttctggggaaagttagcaccttaagcgcagctccactgccaccgggtttacgcgagcaagcaccgcaaggtccacgacgcgaacgctggctggcggggcgtgcattgcttagccacacgctttccccgctaccggagatcatctatggcgaacaaggcaaacctgcatttgcgccggaaatgccgctatggttcaacttaagccatagcggtgacgatatcgccctgctgttgagtgatgaaggcgaagtcggctgcgatatcgaagtgattcgcccgcgcgccaactggcgctggctggcgaacgccgtattcagcctcggggaacacgctgagatggacgccgtgcatcctgatcagcaactggaaatgttctggcgcatctggacgcgcaaagaagccatcgttaaacagcgtggcggcagcgcctggcaaatcgtcagcgtagacagcacctatcactccagcctgagtgtcagccattgtcagcttgaaaatttaagccttgcgatctgcacccctactccctttacgctcaccgccgacagtgtgcaatggatcgatagtgttaactgatccgcccacccgactgcccatctattgatccagaacaggtaatcagtatgacgaatacttaaaatcgtcatacttatttccgccatctattttaatccattggggttaccatgctctccacactccgccgcactctatttgcgctgctggcttgtgcgtcttttatcgtccatgccgctgcaccagatgaaatcaccaccgcctggccggtgaatgtcgggccactaaacccgcacctttacacgcctaaccagatgttcgcccagagcatggtttatgaaccattggtgaaatatcaggcagacggtagcgtgatcccgtggctggcaaaaagctggactcatagtgaagatggtaaaacctggaccttcaccctgcgtgatgacgtgaaattctccaacggtgaaccgttcgatgccgaggcggcggcagaaaacttccgcgcagtgctcgataaccgtcaacgtcacgcctggctggagctggcaaaccagattgttgatgttaaagcactcagtaaaacagagctgcaaattaccctgaaaagcgcctactatcctttcctgcaagaactggccctgccccgtcctttccgttttatcgctcccagccagtttaaaaaccatgaaaccatgaacggaattaaagcgccgattggcaccggaccgtggattttgcaggaaagcaaactgaatcagtacgatgtcttcgtccgtaacgaaaactactggggcgaaaagccagcgattaaaaagatcacctttaacgtcatcccggacccgactacccgcgcggtggcgtttgaaactggcgatatcgacctgctgtacggaaacgaagggttattaccgctcgataccttcgcccgctttagccagaatccggcttaccacacccaactgagtcagccgatcgaaaccgtgatgctggcgctcaataccgccaaagcccccaccaacgagctggcagtacgtgaagctcttaattacgcggtaaacaaaaaaagcctgattgataacgcgttgtatggcacccagcaggtcgccgacaccctgtttgccccttctgtgccctacgccaacctcggcctgaaaccgagccagtacgatccgcaaaaagcgaaagcgttgctggaaaaagccggttggacgctgcctgcgggcaaagacatccgcgagaaaaatggtcagccgctgcgcattgaacttagcttcatcggcaccgatgcgttaagcaaaagcatggcggaaatcattcaggctgatatgcgccagattggcgcagatgtcagcctgattggcgaagaagagagcagtatctatgctcgtcagcgcgacggtcgttttggcatgattttccaccgcacctggggcgcgccatatgatccacacgccttcctcagtagtatgcgcgtaccgagtcacgctgacttccaggcacagcaaggattagccgacaaaccgctgattgataaagagatcggcgaagtgctggcgacccatgacgaaacgcaacgtcaggcgctgtatcgcgacattctgacccgtctgcatgacgaggcggtttatctgcctatcagttacatcagtatgatggtggtaagtaaaccggagctgggtaacatcccctacgcgccgatcgccaccgaaattccgttcgaacagattaaaccggtgaaaccttaatgttgcgttacgtattacgccgctttctgctgctgatcccgatggtgctcgccgccagcgtgatcatttttctgatgctgcgcctcggtaccggcgacccggcgctcgattatttgcgtctgtctaacctgccgccgacgccggagatgctggcctctacccgcaccatgctgggactggatcagccgctgtacgtccagtacggcacctggttgtggaaggcgctgcatcttgactttggtatcagtttcgccagccaacgcccggtactggacgatatgctgaacttcctgcccgccacgctggaacttgcaggtgcggcgctggtattaattctgctcacttccgtaccgctcggtatctgggcggcgcgccatcgcgaccgtctgccggatttcgccgtacgtttcatcgcgtttcttggcgtgagcatgcctaacttctggctggcgtttttactggtgatggcgtttagcgtgtatctgcaatggctacccgcgatgggttacggcggctggcagcacatcattttgcctgcggtttccattgcctttatgagcctggcgattaacgcgcgtttactgcgcgccagtatgctggacgtcgccggtcagcgtcacgtcacctgggcgcgtctgcgcggcctgaacgacaaacagaccgaacgtcgccacatcctgcgcaatgccagcctgccgatgatcaccgccgtggggatgcatatcggcgaactgattggcgggacgatgattatcgaaaacatctttgcctggccgggcgtcgggcgctatgcggtgagcgcgatttttaaccgtgactatccggtgatccagtgctttacgctgatgatggtggtggtttttgtggtctgtaatttgattgtcgatttgctcaacgccgcgctggacccgcgcattcgtcgtcatgaaggagcgcacgcgtgaactttttcctctcttcccgctggagcgtacgcctggcgctgatcattatcgccctgctggcgctgattgcgctcaccagccagtggtggctgccgtatgacccacaggcgattgatttgccgagccgcctgcttagcccggatgcgcagcactggctgggcaccgatcacttaggtcgcgatattttcagccggctgatggcagcgacccgcgtgagcctcggtagcgtaatggcctgcctgctgctggtgctgacattagggctggttattggcggcagcgccgggttgattggcgggcgcgttgatcaggccaccatgcgcgtcgccgatatgtttatgaccttcccgaccagcattctgagcttctttatggttggcgtgctcggcaccgggctgaccaacgtaattatcgccatcgccctgagccactgggcgtggtatgcacgcatggtgcgcagcctggtgattagtctacgccaacgcgagtttgtgctggcgagtcggctttccggtgcgggccatgtgcgggtgtttgtcgatcatctggcaggcgcggtgatccctagcctgctggtgctggcaacgctggatatcggccatatgatgctgcacgtcgcggggatgtctttccttggcctcggtgtgaccgcgccgaccgccgaatggggcgtgatgattaacgacgcgcgccagtatatctggacccagccgctgcaaatgttctggccggggctggcgctgtttatcagcgtgatggcctttaacctggtgggtgacgcactgcgcgatcatctggaccctcatctggtgacggagcacgcacactaatgccgcaacagattgaactacgtaatatcgcgctacaggccgcgcagccgctggtacacggtgtaagcttaaccctgcaacgcgggcgcgtgctggcgttagtcggcggtagcggcagcgggaaaagtttaacctgcgccgcaacgctgggcattttgcccgctggcgttcgccagacggcgggggaaattttagccgatggcaaaccggttagcccttgcgccctgcgcggcatcaaaattgccaccatcatgcagaacccgcgcagcgcctttaatccactgcacaccatgcacacccacgcgcgggaaacctgcctggcgttagggaaacccgccgatgacgctacgcttaccgctgccatagaagcggtggggctggaaaacgccgcgcgcgtgctgaagctgtacccgttcgagatgagcggcggcatgttgcagcgcatgatgattgcgatggcggtgctgtgtgaaagtccgtttatcatcgccgatgaaccgaccaccgaccttgacgtggtagcacaggcgcgcatcctcgatctgctggaaagcattatgcaaaaacaagcgccgggaatgctgctggtgacccatgatatgggcgttgtggcgcgtctggcggatgacgtggcggtgatgtctgacggtaagattgtcgaacagggcgatgtagaaacgctgtttaacgcccccaaacatacagtgacgcgcagcctggtttccgctcatctcgccctctacggtatggagctggcaagttgacctaatacggtatggagctggcatcatgactttacttaacatctccggcctttcccatcactatgcgcacggtggatttaacggaaaacatcaacatcaggcggtgctgaataacgtttccctgaccctgaaaagcggcgaaaccgtcgccctgctggggcgcagcggctgcgggaaaagtaccctcgcgcggttgctggtgggtttagaaagccccgcgcaggggaatattagctggcgtggcgaaccgctggcgaaactcaatcgcgcccagcgtaaagcgttccgccgcgatattcagatggtatttcaggactccatcagcgccgtgaatccgcgcaaaaccgtgcgcgagatcctgcgtgaaccgatgcgccacctgctaagtctgaaaaaatccgaacaactggcgcgcgccagcgaaatgctgaaggcggtcgatctcgatgacagcgttctcgacaaacgcccaccgcagttaagcggcggccagctccagcgcgtctgcctggctcgcgcgctggcggtcgaaccgaaactactgattctggatgaagccgtttctaaccttgatctcgtgttacaggcgggtgtcattcgcctgctgaaaaagctacaacaacagtttggcaccgcctgcctgttcatcacccacgacttacgcctggtagaacgcttttgccagcgggtaatggttatggacaacggacaaatcgtcgaaacccaggtggtgggagagaaattaaccttttcctctgacgccggacgtgtgctacaaaacgcggtattacccgcattccccgtgcgccgtcgcaccacagaaaaggtttaacgcaaatgcaacgagtcaccatcacgcttgatgacgatttactggagacgctggacagcctgagccagcgtcgtggttataacaaccgttccgaagctatccgcgacattctgcgtagcgccctggcgcaagaggccacccagcagcacggcacgcaaggtttcgcggtgctgagctatgtgtatgaacacgaaaaacgcgacttagccagccgcattgtctccacccagcatcatcaccacgacctctccgtcgccacgctgcatgtgcacatcaaccacgacgactgtctggaaatcgccgtgttgaaaggtgacatgggtgacgtgcagcattttgccgatgacgttatcgcccagcgcggcgtgcggcacgggcatttgcagtgcttgccgaaggaagattgagttacgccattgtcccaatcgtcttcctgaatcgcagcagcgcaatggtgaaaaatgcgccgccaattgccatcagcgtcagaaactgcggccagacgatttcgaatccggcaccccggtagaggatggcctgcgcgaggctaacaaagtgtgtcgtcggcatggtcagcataatgtcctgcaccatctgcggcatactttcgcgcggcgtggaaccaccggaaagcatttgcagcggcagcagcaccagaatcaccagcagccccagttgcggcatactacgcgctatcgtccccataaaaatgccgatactcgtggtggcaaacagactgagcgccacgcccagcataaacagcgggatgctgccttcaatcggtacgcccagtacacctttcaccatcagcaccaggcttaatccgcttaccaccagcaccaccagccccatgctccagatcttcgccatcatgatctcaaacggcgttatcggcatcaccagtaagtgttccaccgtgccgtgttcacgctcgcggatcagcgcgcttccggtcaatacaatcgccagcatggtaatgttgttgatgatcgccatcaccccgccaaaccacgcgggatcgaggttcgggttaaagcgcatccgggtttccaggcttaccaacggttcgctgttatcacggtagcgcgcgacaaagctgttcacttcaccgttgataatattctggatatacccattgccggtaaatgcctggctcatgcgcgtggcatcgacgttcacctgaatatccggctggcgtccggcgaggacatcacgctgaaaattaggcggaatatttatcgcgaaggtatagcgtccggcgtccagtccggcatccatctcatcggcggtgatcatctccggtggcaaaaaccacggacgatagaagctgttaacgatccggttgcttaactggctttgatccatatcggcaatggcgatcggcgcgaggttcaagcttcctggcgtaacggtcgcactgctatacacgctcaccgtaaagctgaagacaatcagcgtcagcatcgctttatcaccgagcagactgcgcaactctttgatacccagattaaaaatattgcgtaaatggcgcatcatccctcctgttttttcagcagcaggatacttaagcccatcaccagcgggatggctatcagtaacgggataaaaagttgccacaaatcagtcagatccagcgctttgctgaacgtcccgcgggcgatagtcagaaaatgactggtcgggtaaacctcgccgatccaacgtccaggcccttccaggctagctaccggatcgatcatcccggaaaactgtgtcgccgggatcaacgtgataatcgccgttccgaaaatggcggcaatctggcttttcataaaggtggagatcagcagccccattccggtggcaatgatgatatacagcagcgccgccagggtgagcgtcaggaaactgcctttatgcggtacgccaaacacaaacacgctcaggccgcagagcaggaaaaagttcagcatccccagcgcgatgtatggcaactgtttaccaagcaaaaattcactacgcgtggtgggggtcacgtaaaggttgataatgctcccaagctctttttcccgcaccacgctaagggcgcttagcatactcgggatcatcatcagcagaagcgggatcaccgccggaacaatcgctggcaggctttttacgtccgggttatagcgatagcgcgtctcaatattcatcagcccgctttggctggcgggtgtgctttgtcggctcgccacatcctgtaaccagctctggtgcatggcctgcacgtaaccttttaccgtttcagcacggctcggcatcgctccgtcgatccagacgccgagttccacaggcgtaccacgcgcgatatcgcgcccgaaattgggcgggatctcaatcgccaccgtgatatcgcccgcacgcatccgacgatcaagctcgtcataactggtgagcggcggctgttcgataaagtaacgggaaccggagaggttgagtgtccacgcctggctactgacggtctggtcgcggtcgagcaccgcaaagcgcaggttttccacatccatactgatgccgtaacccattatcagcatcaggatcaccgttcccatcagcgccagcgtgctacgtactggatcgcgtcgcagttccagcgcttcgcggcggctgtagctaaacagacggcgcaggctaaatccctgacgcggcgcgtgggtggtgtcgtgtaccacgggcggcgcttcggcttcgttgctctgccctgccgcttcctgcaaataggcgataaatgcctcttccagactggcggctccgcgtttctcaaccagttcctgcggtgtaccgctggcaagcacttttccggcgtgcatcagactgatgcggtcgcaacgttccgcttcgttcataaagtgggtggagatgaagatagtcactttgtcctggcggctgagatcgaccatcaactgccagaacatatccctcgccaccggatcgacaccagaagtaggctcatcgaggattaacatctccgggcgatgaatcaccgccaccgccaggctaagccgctggcgaatgccgagcggcaaactctccggcagaatatcttcaacgtcgttgagcttaaaacgctcgctcatttcagccactcttgcgggaatttccgcttccgggatgtgaaacaaacgggcatgtaactcaaggttttgccgcacggtgagttcgttatagaggctaaacgcctggctcatatagcccacccgacggcgggtatcgatatcttttggatcaaccggttgcccgaacagccacgcctcaccttcgctggcgggcagcagtccggtgagcattttcatggtggtggatttaccgcagccgttgctaccaagaaaaccaaaaatctccccgcgtggaatgcggaaattaacgtgatcaacggcaacgaaggaaccaaaacgcatggtcagatcgcgcgcttcgatggcaatctctgcgttttcaggttgatacggtgggatcactaccgcctgatgcgcctggcgttgcgcttgcggtaacagatttataaatgcttcttccagcgtagcgctttgcgtttgctgccgtagctcttcggcgctgccagttgccagcacttctccggcattcatcgctaccagccagtcgaagcgttcggcctcttccatataggcggtggcgaccagcacgctcatattgctctgccgctggcgaatactgtcgatcagatcccagaactgggagcgggagagcgggtcaacccccgttgttggctcatcaaggatcaacagttccgggtcgtggattaacgcgcagcacagcccaagtttttgcttcatcccgccggagagtttccctgccggacgatcgcgaaacggtgctaacccggtgctggtcagcagctcattgattcgcacttcccgctccgctttgtcgtgaccgaacaggcgagcgaaaaaatcgacgttttcatacacgctcaaggtgtggtagaggtttttgcccagcccctgcggcatccaggcgatgcgcgggcagacgtcgcggcgatgcttcgggtcgcgcatatcgccgcccagcaccatcacattgccctgttcaatgacgcgggcaccggaaatcaagctcaacaagctgctcttcccgacgccgtccgggccaatcagcccgaccatacagcgggccggaatatcgagagtgatattgttcagcgcaacggtttttccataatgctggctcacgcccgccagttgcgcgacaggcgggacgggaaccagttccagatgcgtcattgcggcaacctcaccacgaggtcgtcaggccacggaagttcttcattcacccgcacccacgctacgcccggcaaaccggttttgacatattccagatgctgctggagtaattccggtgggatacgcgctttgacgcggaacatcagtttcagccgttcatcgctggtttcgacggtttttggcgtgaactgggcgacactggcgacaaaactgatggttgcaggaatacgcagatctggcgcggcatcgaggatcagccgggcttcaccgcccagtttcagcgtgcccgcctgttcggttggcaggaagaaagtcatatagacgtcgctgagatcgaccatattcagcacccgaccgcctgccgccagcacttcgcctggctcggcaacccgatactgcacgcgtccgtcacgcggggctttcagttcgctgtcatcgatatctgcggcaatgcgccgttcagtggcttgtgccgcttcgacgcgggtttgcgcctgaatgatattggtgcgtgccgcttctatagccgctttagaagcgcttacctgagctttcgcgctttccagcgcagctcgggcgctctcagcggcggcgcgatcgtcatccagctgttgcgcagaaatagcccctcgttgggccagactacgggaacgcgtatgacgttttgctacggagtccagttctgcctggcgttgattaaccaggctctgtgcggcacgagtttcgctttgtcgttgctccagcaaagcctgcgcggcagcaacggcgctttgtgcctctttgatttgcgcgatggcttccagtcgctgttcctgcaacacgcgagtatccatcttcgccagcacttcaccttcgcgaacaaacttgccttctttcaccagaatggtgtcgatacgcccggcaattttgctggcaatatccacttccgtcgcttcaatgcgcccattactgacagcaaagccttccggcacacctgccgggcgcaacagccaccacgccacgatagccgccaccgccagtaacccgacaacccaccacgccagatggcgcttactcttatccataatcgacccgccataatccctgtaagcaaacgacgcgtgttacaactgccgccgaacgacgttcagcggattcttccatccgggataagaaggaaacggcaaatacgaccagcgcgcagagcattgagcgccaacggggaaggcttagtgaaaacgggtagtaatgttgtcatcatcagcattcctggccgtaaatgaaacacgcatactcataagtgtgatctataaaactggctgacaaaacggtatccatcctgttggatagcgtttcacgcctgttcagttgcaggaacagagcattcctttttacgttttatcaacagtctcaaccagatagtaacattaatattcatgttgtctatggttcagagctgtaacattgtgcgccttctaatcaaaggcataagtccatttctgtttttttcatgctggtaagacttccagggagtggttatctcaggccctgcaccagggttaatttggcaattatgcatgctgaacattcttccagcatgtttactgtcacgggcgttaagacctaaaactgtccccgtttcgcctatgcgttctcttccaccatttccgttatgtgcaacaacttgatttatacctaacatttgactacatgctaatagtgcttcaagtttaggtctgtaatctgtgctaacagaaaaataacgattaaaggatcgacaagagatagcccggctagttttaaactttttgccattaattatagcatgatgctttttattgataattgccgctaattcgaccggatcgagagcattggtcatttcatcaatagagactgttatcggtcctataatgtaacgttttcgctgatcatcaaaagttatcccatgatgatttgccattattttgtatttggggtcatagaaacatacaggataatcttttatcccagagtaggtatcctcatcgagtggtttcatacgcgtgaagttctgcatatagttaccattgcaattcgtttcatgatttccagctaatacatgaacattttcattgatactcattatgcgttttaacaaatcgatgataaattgatcaccacagatattgctaaatcgatcgccggtttggtcgcccagaaacgtacatggcgtcacagcgtctttattaataactaaataaggctgaagactttctaaaataatgtctcttctgttcaggatactgattattgtattaacattagtgttaagttgctcattaaagttctcccttagcaatacgttgagaacttcatcttctatattaagcaactggctaaggaaattttctccttcagccatgattcccaaatgtcccgttgcgaaaagcgcgaacaaaactgcaccgacactgccatcggtatcaccaaaataggttggtctggtacttgtgggatcaacgggtaaacaattggagaaatagattctgtcagcgaactggggttttatcattgtttcgaatttaatatcagatacattatattggcttattttccagttccagatgggtttgtagctctcagtaactgcaacatcattagcattatcatttactgtcatattattaagtaaataaacaatactgcaccaattaatatcggtattatcaagagagcaaccgtaatttttgctattaattgtcacaataaactgataattattattcctacgtagaatatgagcacgcatgccgcttagcatactatatttttcactatgatccgtttgtatggtaaaactaattttgtcatcttgaatagattgttggaaccgttctatttgccaatcatctattttttccacaacctcaccgagcattgtcctggcaatactacttatatcatcacctataccatttgcaatatacccaaacagttctttagtgaagttggtaacatgctcttgcaccatatcatttgttgcgattgtcgttgtactgtcgttagtgcctgccacagttccaattttcatattttacctcatattatttaccgcgaggaatacatagttaacattttatcttatgacatacacctcatgttcgatgggaaaataattatattttgcacaaatcattcagcctcaaagcataatatgaaatttcttatctcatagcagagaaagtccctaaagattgtagaggcgtcatcagaacatgcctctacaatcgattaagaaaacctatgaaatactggcaggattaaaaagacataccaccgtattcatggagttttaatgtagttgaaaacaactaagcccactggaataaattattttattatttttatcacgtgcttccttcagggaatttagccccataataccattatcaaattgttgattatgatctaccccgggcccatgatgcccatatttttgtctaatgtatttgctggggtcttcacctttgagtgtctccccacatatgaagatacgttcacgtgctggtctgaaatcagtagtgttatcaaaataattagcatatacaggtgtgggtttcaaagtattgcttcggattagatggaatagaggatcatccatgtgttctttatgttttttattaaaaatattggctaattcctcaggatcagtaggatttttcatctgattaaatggaacctgcaaagcacgctgacaataacatttttttcttcatctcttattattccgtgatgactggttaaaacttgcctttcactgtcataattacaaacatcgagcgttttaattaagttatacgtatcaccggcagagagtttatgatttgctagtcgtgcagtatagttaccattaaaattgatttcatgatttccagccagaacgacgacatttttattaatacggctatctttattaccctccatatttcgcatagaatttagcaaagtaaggatatatttatcaccaaaaatagtactaaatctatcgcctgtatgatccccaaggaagatacaaggggttatcgcatcgtcctttaaaaaaacatgttgatgcaactcattcaagatcatgtctctcgtatttaataaatcgtagagcactttattatttttatgtttgtatgcagaactagccatctcttcgtgttttaataattcacataataaactccaacccttttccctgatgcctatatgcccactaacgagcaatgcataaagtacagcgcctactcttccatctgtatcgccaaaataagccgtgttggcattttgtgggttaatcacaccacactgtttatagaagtctattttactaaacacagatttaacatagctatcaaacttttccttagtaaacgtctctttagagacatcccaacgccagtcaggtttgaaattaccactaagaagagtaaagaaatttctcgctatgatagaaagcccatcaactttataaattatatcacttttatctccagaggaattaataaaataataaccgcccttacactcaacagtaacggtaatgggagagcttaattttaacacatggttattgtctggtataattgtaaagataaacgtatcagtagtattgtcggcgaatctattatattcttgaatatctatagaaggttcactattataaaaccatactttctccatctggtgactacgatcatttaccttccagtgaccatgttgcaggaaatagatgatatgcaggccaaaatcgttatctatttggctatcattatccagtttatcaaattcaactatctttgcacgatgtgttttatcaaccttgccatggtgttgatgactgttaactttatcactatgcttatcttgatggctactagagatgtttctaatctgattgtcaattgctttcataaataacctgtgatatttttgaattgtttgtaacaaaataaatgatacttgtctgaaaaacagatttacgacgatataaaataataatacttatatgttcgctgattttaagcaccgagactatccggtcttttaccaaataatgaagaataatccctccctggaagataattgtaaaaaacaacagcataagaattaatcttaggataaatttttatttatcatggccttttgaacgctgaaaagtagcgctctgcaaagtaaaccccgctatagttatgctatgcatttgtctttaatgatatctcgtcattatattaacaggatgaaattatcattaatgcatatttcaatattagcagggatacctgaggagtttaaagtgaacatatatatcgggtggcttttcaaattaatccctttgattatgggcttaatttgtatcgcgttaggtggctttgtgctggaaagtagtgggcaaagcgagtatttcgtcgcgggtcatgtgctgatttctctggcggccatatgcctggcattattcactaccgcatttattatcattagccagctcacgcgcggcgttaatacgttttacaatacattgttccccattattggctatgcggggagtattatcaccatgatatggggttgggcactgttagcaggcaatgatgtgatggcagacgagtttgtcgccggccatgttattttcggcgttggtatgattgccgcctgtgtaagcacggtggcagcgagttccggtcactttctgctcattcccaaaaatgcagcggggagcaagagcgacggaacaccggtacaggcttattctagtttaatcggtaactgcctcattgccgttcccgttttactcaccctgctcggtttcatttggtctattacgctgttacgtagtgctgacataactccgcattatgtcgcgggtcacgtattgcttgggttaaccgcaatctgtgcctgtctaattggccttgttgccacaattgtccatcaaacacgtaatacgtttagtactaaagaacactggctgtggtgttattgggttatttttctcggcagtatcacggtactgcaggggatatacgtcttagtcagttccgatgcaagcgcccgactggctcccggcattattcttatttgcctcggaatgatctgttacagcatattcagtaaagtctggctactggcactggtatggagacgtacctgtagcttagccaacagaataccgatgattcccgtcttcacctgcctgttttgccttttcctggcaagctttcttgcggaaatggcgcagaccgacatgggatattttattcctagccgagttctggtcggtttgggagcggtatgctttacgttgttcagtatcgttagtatattagaagcgggttctgctaaaaaataattgcaacgtaccggataaaaccagcgttgaccatttgcgtaacgctggtttttcttaggcatcatgaaataacgcagcattaatgcatagtggttaagtataaaaaacagcaaagttactgtttttttcaacctgttcatatttcataaagatctggccactgagtgagttttcaatcacctttccatccaccttatattaagcatggagggtttcagttcacgggctcattagaaaataatcacaagataaccactatcaaaattagctcatttttaatgcgactctaataattttcatctttaggaaataggtcaggagctctttgctgcaatcaaatcctgcgcacaagcccacgcactgctccacgcccactggaagttatagccccccagccagccggtgacgtccatcacttcgccgatgaagtacagcccaggcactttgcgcgcttccatcgtccgactagagagttcgttggtgtccacgccgccgagcgtcacttcggcagtgcgatagccttcagtgccgttgggttgtacgcgccagtcggtcaatgtgctaatcagtgcctgttggtcacgcacgttgagctgttttaggctaacatccgggatttgcccgagttgctgtaagcgttcaaccaaccgcttcggtagatgaaccgccagtgtgtttttcaggctttgattcggatgtgcgttacgctgctcattcaggaaggtttcgaggtccacatccggtagcagattgatgctgacaaattcccccggttgccagtagctactaatctgcaacaccgccggtccagacaagccgcggtgggtgaagagtaagttctcacggaaaacggtgccgttttcagcggtaatcacggaaggcaccgccacgcccgccagcacctgtaactcttcgagcaacggtttatgcagagtgaatggcaccagacccgcgcgggtcggcagcacgttgaggccaaattgttcggcaatcttataaccaaacgggctcgcgcccagccccggcatactcagcccaccagtcgcgatgaccagcttttcgcaaccgacagtcatgccgttcagatcaagcgtgaagcctgtttcatccttcgccacactcagcacttcgctacgcaatctgaaggtcacattgcccttctcgcactcatccaccagcatgtcgacaatctgctgcgcggagtcatcgcagaagagttgccctaacgttttctcgtgccaggcgatgccgtgtttattgaccagatcaatgaaatcccactgggtaaaacgtgcgagtgcagacttacaaaaatgcggattctggctcagataagcgcctggttcgacataaaggttggtaaagttgcagcgcccaccgccagacataaggattttgcgccctggttttttaccattatcgatcagcagaacccggcgtcctgcctgacctgccagcgcagaacagaacatacccgccgcaccagcgcctataataatggcatcaaacctttccacgttgcgctcctcttagaaaaaacgggcgtgaattgtaaagattcctcagtggtcgcaccagcatcaatattactaaaaggaagtatttgcctgaattatataagataattattttttgagtgaaatccatacagggggcaaatcaaaaaaagtctatatttcactttgcccgcgccgcgaaagtcactgataatgcgccgcgttcatgtcctcaaaatggcgtaacgtcctatgctacatttgtttgctggcctggatttgcataccgggctgttattattgcttgcactggcttttgtgctgttctacgaagccatcaatggtttccatgacacagccaacgccgtggcaaccgttatctatacccgcgcgatgcgttctcagctcgccgtggttatggcggcggtattcaactttttgggtgttttgctgggtggtctgagtgttgcctatgccattgtgcatatgctgccgacggatctgctgcttaatatgggaagctctcatggccttgccatggtgttctctatgttgctggcggcgattatctggaacctgggtacctggtactttggtttacctgcatccagctctcatacgctgattggcgcgatcatcgggattggtttaaccaatgcgttgatgaccgggacgagtgtggtggatgcactcaatatcccgaaagtattaagtattttcggttctctgatcgtttcccctattgtcggcctggtgtttgctggcggtctgattttcttgctgcgtcgctactggagcggcaccaagaaacgcgcccgtatccacctgaccccagcggagcgtgaaaagaaagacggcaagaaaaagccgccgttctggacgcgtattgcgctgatcctttccgctatcggcgtggcgtttagccacggcgcgaacgatggtcagaaaggcattggtctggttatgttggtattgattggcgtcgcgccagcaggcttcgtggtgaacatgaatgccactggctacgaaatcacccgtacccgtgatgccatcaacaacgtcgaagcttactttgagcagcatcctgcgctgctcaaacaggctaccggtgctgatcagttagtaccggctccggaagctggcgcaacgcaacctgcggagttccactgccatccgagcaataccattaacgcgctcaaccgcctgaaaggtatgttgaccaccgatgtggaaagctacgacaagctgagccttgatcaacgtagccagatgcgccgcattatgctgtgcgtttctgacactatcgacaaagtggtgaagatgcctggcgtgagtgctgacgatcagcgcctgttgaagaaactgaagtccgacatgcttagcaccatcgagtatgcaccggtgtggatcatcatggcggtcgcgctggcgttaggtatcggtacgatgattggctggcgccgtgtggcaacgactatcggtgagaaaatcggtaagaaaggcatgacctacgctcaggggatgtctgcccagatgacggcggcagtgtctatcggcctggcgagttataccgggatgccggtttccactactcacgtactctcctcttctgtcgcggggacgatggtggtagatggtggcggcttacagcgtaaaaccgtgaccagcattctgatggcctgggtgtttacccttccggctgcggtactgctttccggcgggctgtactggctctccttgcagttcctgtaatcgtacgcaccaaaacgagcgggtcagctggcccgcttcagattgtgacatagtgcgctttgttcatgccggatgcggcgtgaacgccttatccggcctacaaaaacatgcaaattcaatagattgcagagattatgtaggcctgataagcgtagcgcatcaggcaattttgcgtttgtaatcagtctcgagcgggtcagtttactggcccgctttttttatgcgttattattgctgaagtgcttaatgccaaatcatcaatgcaatcaggctgaccaccaccagaccacacaatgcgctggtcagaataaactgccgacgcacccgctcacagcggcgaataaattcatcatcgtgatgatcgcgataacgttgggcatagatataccaaacgagacgcacctgtttgttgggttggccatgattggtaaaaaagccccctccatcaacatattgatagagcaatggatcgcagttacgcagtaccactaacaacgcgcgtagactactgaaatagcgcgccatgttaacaatgcaaacgacacataaagcccaaaataatgcgacggtgcttatcatacctcctccccggcgacctgcccgcggagttccaccccggggctaccgctcccgatacgctgccaatcagttaacaccaggtcctggagaaaccgcttttgtggtgaccaacatacgagcggctctatagatagtgtaggagatcaggttgttttttttccagaaggttaaccactatcaatatattcatgtcgaaaatttgtttatctaacgagtaagcaaggcggattgacggatcatccgggtcgctgtaaggtaaggatggtcttaacactgaatctttacggctgggttagccccgcgcacgtagttcgcaggacgcgggtgacgtaacggcacaagaaacgctagctggccagtcatcgacaactttatggaaggagtaacactatggcttataaacacattctcatcgcggtcgacctctccccggaaagcaaagttctggtagagaaagcagtctctatggctcgcccctacaatgcgaaagtttctctgatccacgtagatgtaaactactctgacctatacaccgggcttattgatgtgaatctgggtgatatgcagaaacgcatctctgaagagacacatcatgcactgaccgagctttccactaatgcaggctacccaatcactgaaaccctgagcggcagcggcgacctgggccaggttctggtcgatgcaatcaagaaatacgatatggatttggtggtttgtggtcaccaccaggacttctggagcaaactgatgtcttccgcacgtcagctgatcaacaccgttcacgttgatatgctgattgttccgctgcgcgacgaagaagaataatcttccctctacgacgtgttcctgaacgcccgcatatgcgggcgttttgctttttggcgcgccttgttacctgatcagcgtaaacaccttatctggcctacggtctgcgtacgcaatcaaaatccccagccaatacaacatttaacaccatcatattttccatcattagtgtgatcatctggttattttctgttgtaatagtgtattaatctattcaccgcatcaatattaagaatctctgacagatgtaaactttttcgcgcgttatcccttacgcgttcatacttttcaggatggtattggaaggttaataaatatgaatacaacaacacccatggggatgctgcagcaacctcgcccatttttcatgatcttttttgtcgagttatgggagcgattcggctactacggcgtgcagggcgtactggcggttttcttcgttaaacagcttggattcagccaagagcaggcttttgtcacttttggtgcttttgctgcgctggtctatggcctcatttccattggcggctatgtcggcgaccacctgctggggaccaaacgcaccattgttcttggagcacttgtgctggcgattggctacttcatgaccggcatgagcctacttaagcctgacctgattttcatcgccctggggactatcgctgtcggtaacggcctgtttaaagctaacccagccagcttgcttagcaagtgctatccgccgaaagatccgcggcttgatggcgcattcaccctgttctatatgagcatcaacatcggcagcttgatagcgttaagcctggcccctgtgatcgctgatagattcggttatagtgtcacctacaacctgtgcggggcggggttaattatcgcattactggtttacatcgcctgtcgtggaatggtgaaagacattggttctgaacccgacttccggccaatgagcttcagcaaactgttgtacgtgttacttggcagcgtggtgatgatcttcgtatgcgcatggctgatgcacaacgtagaagtcgccaatctggtgctgattgttctctccatcgtcgtcaccatcatcttctttcgtcaggcattcaagctggataaaaccgggcgcaataaaatgtttgtcgcctttgtcctgatgctcgaagcggtggtgttttacattctctacgcccagatgccaacaagcctgaacttctttgccatcaacaacgtgcatcatgaaattctcggtttttccatcaacccggtcagcttccaggcgcttaacccgttctgggtggtactcgccagcccaatactggcaggcatttacacgcatctgggtaacaaaggcaaagacctcagcatgccgatgaaatttactctcggcatgtttatgtgcagtctgggctttttgacggcggcagctgcgggaatgtggtttgcggatgcacaagggctgacaagcccatggtttatcgtgctggtgtacttattccagagcttaggtgaactgtttattagcgcccttggcctggcgatgattgctgccctggtgccgcagcatttgatgggctttattctcgggatgtggttcctgacgcaggctgccgcgttcttgctgggcggctatgtggcaacatttaccgcggtgccggacaacattaccgatccgcttgagacgttgcccgtctataccaacgtgtttggtaagattggtctggtcacgctgggcgttgcagtagtgatgctgttgatggtgccgtggctgaaacgcatgattgcgacgccggaaagccattaattattcttgcagaaagcagggtagcgttatcgctaccctgttttagttttacactggcgtacctgcatagatatcaaagcgatgccctttagtgactaccgcgtttggcgtggcgacattcgccagcggtggcgcgtagtccgggcgctttaccaccacgcgtttggtcgccagcaagcgtgcaggctccagtaatccatcggcatcaagatccggtcccaccaggctctgaaagacacgcatctcttttttcactagcgcgcttttctgcttatgcgggaacatcgggtcgagataaaccacctgcgggcgcggggtaatatcagtcagcgccgtcaggctggaggcgtgaattaactgcaaccgctcctgcaaccagccgccgatttccgcatccgcataaccacgcgccaggccgtcgtcgagtagcgcggcaaccactggattacgctccagcatccgcacgcggcagccgacactagccagtacaaaggcatcgcgcccaagtcctgcagtggcatccaccacatccggcaaataatcgcctttaatgcccaccgctttcgccaccgcctcaccgcgaccaccgccgaatttgcgtcggtgcgccatcgctccgccaacaaaatcaacaaagatgccgccaagttttggctcatcacgcttgcgcaattccagatgttccggcgttaacaccagcgccatcaggttgtcttcatcgtgctccagcccccagcgggccgccagaacagataaggcaccgtctccggtgcctgtttcatcaattaagcagattttcactgaatgatcagcccttaatgccgtaatgctccagcatcgcatccagctgcggttcacgaccacggaagcgtttgaacagatccatcggctcttcactaccgccacggctcagaatgttgtcgaggaagctctgcccggtttcacggttgaaaatgccctcttcctcaaagcggctgaaagcatctgccgccagtacgtcagcccacaggtagctgtagtaacctgcggcataaccaccggcgaaaatatggctgaaagcgtgcgggaaacggccccaggacggagatggcaccacggcaaccagtttcttgatttctgccagagtttcgaggatttttgccccctgatccgggcggaactcggcatgaaggcggaaatcaaacaggccgaactccagctgacgcagaataaacagcgccgcctggtagttcttcgccgccagcattttatccagcaactctttcggcagcggttcgccggtttcatagtgaccagagataaacgccagcgcctccggctcccagcaccagttttccataaactgactcggcagttcgaccgcatcccacggcacaccgctgataccggaaacaccagcggtttcgatgcgggtcagcatatggtgcaggccgtgaccgaactcgtggaagagggtgatcacttcgtcgtgagtgaacagcgccggtttaccatttaccgggcggttgaagttacaagtcaaatacgcgaccggtttttgcaaagaaccatcagctttacgcatctggcctacgcagtcatccatccacgccccgccgcgcttgttttcacgggcatacagatcgaggtagaagctaccgcgcagttcgttattttcgtcatacagttcgaagaaacgtacatccggatgccagacatcaacatctttacgctctttagcggtgatgccgtaaatacgcttaaccacttcaaacaggccgttaaccgctttgttttccgggaagtacggacgcagctgttcgtcactgatgctgtagaggtgctgtttttgtttttcgctgtagtaagcgatatcccacggctgcaactcatcgacgccaaattcggctttggcaaaggcacgcaattgcgccagctctttttcgccttgtggacgcgcgcgttttgccagatcggttaagaaatccagcacctgctgcgggttttctgccattttagtggcaagggatttaaaggcgtagttttcaaagcccagcagttgcgccagttcgtgacgcagcgcgaggatctcttccatcaccttgctgttatcccatttaccggcgtttgggccttgatcggaggcgcgggtgctgtaagcgcgatacatctcttcacgcagagcctggttgtcgcagtaggtcattaccggcaagtagcttgggatatccagcgtcagcaaataaccttccagctctttcgcttcggcctgggcttttgccgcagccagcgcgctttctggcatccccgccagctccgcttcgtcggtaacgagtttggtccagcccattgtcgcatcgaggacgttgttgctgtactggttgcccagttcagaaagacgggtcgcaatttcgccgtaacgctgctgtttctctttcggcagacctatgccagagagttcaaagtcgcgcagtgcgttatcaaccgctttcttctgcgccgtgttcagcgtggcgtaatgatcgccatcgcgcaggtcgcgatacgctttatacagcccttcatgttgccctacccaggtgctgtattcgctcagcagcggcagggtttgttcgtaggcttcacgcagttccgggctatttttcacgctgttcaggtggctgaccggggagaagatacgccccaacacatcgtccacttccgccagcggctggcagagattttcccaggtgtacggtgccccttgcgctactacgcgctccacgttttcgcggcagtcgttcaatgccttagtcacggctggaacgacatgttccgggagaattttagaaaacggaggcaattcaaagggagtcagtaacggattcgtcattcgcgcagtcctggttaaagaggttaaggaagcgctcaacaggcgctttacataatgtgtgtagcatggggttaagtgtagtgaatttcaatgagaaacgttacgctttcgcggcggcggcctcttttcggtatactgtcctgatacgcttttgtgcgccccgaatacgggccgatttttacttaccggaacacctttacccatgctcagttatcgccacagctttcacgctggcaaccacgccgacgtccttaaacataccgttcagagcctgatcatcgagagcctgaaagagaaagataaaccgtttctctatctcgacacccacgcaggggccgggcgttatcagttaggcagcgaacatgccgagcgtaccggcgaatatctcgaaggcatcgcccgtatctggcagcaggacgatttgcccgcagaactggaggcgtacatcaatgtggtaaaacacttcaaccgtagcggtcagttgcgttactaccccggtagcccgttgattgctcgcctgctactgcgtgaacaggacagcctgcaactgaccgaactgcacccgagcgattacccgttgttgcgttctgaatttcagaaagatagccgtgcgcgtgtcgaaaaagccgacggtttccagcagcttaaggccaaactgccgccggtttcccgccgtggtttaatccttatcgacccgccgtatgaaatgaaaactgactatcaagcggtggtcagcgggatagcagaaggttacaaacgtttcgccactggtatttacgcactgtggtatccggtggtgctgcgtcagcaaattaagcgcatgatccacgatctggaagcgaccggtattcgcaaaattctgcaaattgaactggcggtactgccagacagcgatcgccgtggcatgaccgcttccggcatgattgtgattaacccgccgtggaaactggaacaacagatgaataacgtgctgccgtggctgcacagcaaactggttccggcaggcaccgggcacgccaccgtaagctggatcgtgccggagtaattgcagccattgctggcacctattacgtctcgcgctacaatcgcggtaatcaacgataaggacactttgtcatgactaaacactatgattacatcgccatcggcggcggcagcggcggtatcgcctccatcaaccgcgcggctatgtacggccagaaatgtgcgctgattgaagccaaagagctgggcggcacctgcgtaaatgttggctgtgtgccgaaaaaagtgatgtggcacgcggcgcaaatccgtgaagcgatccatatgtacggcccggattatggttttgataccactatcaataaattcaactgggaaacgttgatcgccagccgtaccgcctatatcgaccgtattcatacttcctatgaaaacgtgctcggtaaaaataacgttgatgtaatcaaaggctttgcccgcttcgttgatgccaaaacgctggaggtaaacggcgaaaccatcacggccgatcatattctgatcgccacaggcggtcgtccgagccacccggatattccgggcgtggaatacggtattgattctgatggcttcttcgcccttcctgctttgccagagcgcgtggcggttgttggcgcgggttacatcgccgttgagctggcgggcgtgattaacggcctcggcgcgaaaacgcatctgtttgtgcgtaaacatgcgccgctgcgcagcttcgacccgatgatttccgaaacgctggtcgaagtgatgaacgccgaaggcccgcagctgcacaccaacgccatcccgaaagcggtagtgaaaaataccgatggtagcctgacgctggagctggaagatggtcgcagtgaaacggtggattgcctgatttgggcgattggtcgcgagcctgccaatgacaacatcaacctggaagccgctggcgttaaaactaacgaaaaaggctatatcgtcgtcgataaatatcaaaacaccaatattgaaggtatttacgcggtgggcgataacacgggtgcagtggagctgacaccggtggcagttgcagcgggtcgccgtctctctgaacgcctgtttaataacaagccggatgagcatctggattacagcaacattccgaccgtggtcttcagccatccgccgattggtactgttggtttaacggaaccgcaggcgcgcgagcagtatggcgacgatcaggtgaaagtgtataaatcctctttcaccgcgatgtataccgccgtcaccactcaccgccagccgtgccgcatgaagctggtgtgcgttggaagcgaagagaagattgtcggtattcacggcattggctttggtatggacgaaatgttgcagggcttcgcggtggcgctgaagatgggggcaaccaaaaaagacttcgacaataccgtcgccattcacccaacggcggcagaagagttcgtgacaatgcgttaaatgttaaagggctaagagtagtgtgctcttagcccttaattacgtttccgctatcagttcagaagctgaagcagaaagcggatcagttccagcagcgcaattaacgcccctagaacgatgattgctttatcaatcacccgttttctccatgcgatggagtgagaatgcatccgcttactcatccactgcctgtcacggcgcatgtctcattgttagataagaactctctcactccggccagagcatcagttaacggcaccacccgtacttctgaccaggactttgaaagcgtttatgcgcattgccagagtgaaaatgcctcagagctaactggataatcatacagtacatgcaggttataaaaccagcacgtccttgcaatagtttcagtatggtattagcattgatgcgttagatgatggctatctcactccagtcagagccaccaactcagggctggaaagtaaaaaaccgacgcaaagtcggtttttttacatccggattcggacaaggcttaatatgacgatgacccagtgaaagtatataaatcgtcactgcgatatataccgaagtgctccctccgccagctgaagaaatcgctaattcttgcaatgttagccactggctaatagtattgagctgttagataagaactctctcactccagccagagccaccaactcagggctggaaagtaaaaaaccgacgcaaagtcggtttttttacgtcctgattcagacctcctttcaaatgaatagccaactcaaaattcacacctattaccttcctctgcacttacacattcgttaagtcatatatgtttttgacttatccgcttcgaagagagacactacctgcaacaatcaggagcgcaatatgagttttctgttacccatccaattgttcaaaattcttgctgatgaaacccgtctgggcatcgttttactgctcagcgaactgggagagttatgcgtctgcgatctctgcactgctctcgaccagagccagcccaagatctcccgccacctggcattgctgcgtgaaagcgggctattgctggaccgcaagcaaggtaagtgggttcattaccgcttaagtccgcatattccagcatgggcggcgaaaattattgatgaggcctggcgatgtgaacaggaaaaggttcaggcgattgtccgcaacctggctcgacaaaactgttccggggacagtaagaacatttgcagttaaaaatttagctaaacacatatgaattttcagatgtgttttatccgggaggcattatgttactggcaggcgctatctttgtcctgaccatcgtattggttatctggcagccgaaaggtttaggcatcggctggagtgcaacgctcggcgcagtactggcgttagttacgggcgtggtccatccgggtgatattccggtggtgtggaatatcgtctggaacgcgacggctgcgtttatcgccgtcattatcatcagcctgctgctggatgagtccggcttttttgaatgggcggcgctgcacgtcagtcgctggggtaatggtcgtggtcgcttgctgtttacctggattgtcctgctcggtgctgccgttgccgccctgtttgccaatgatggcgcggcgcttattttgacaccgattgtcatcgccatgctgctggctttagggttcagtaaaggcactacgctggcgttcgtgatggcggccggattcattgccgataccgccagcctgccgcttattgtctccaacctggtgaatatcgtttccgctgatttctttggcctcggctttcgcgaatacgccagcgtgatggtgccggtggatatcgccgcgattgttgccacgctggtgatgttacatctctattttcgcaaagatattccgcagaactacgatatggcgctgctgaaatctcccgcagaagcgatcaaagatcctgctacgttcaaaactggctgggttgttttactgcttctgctggtgggatttttcgtcctggaaccgctcggcattccggtgagcgccattgcagctgtgggcgcgctgatattatttgtcgtcgctaaacgcggtcatgcgattaatacgggtaaagtcctgcgcggtgccccctggcagattgtcatcttcagcctcggcatgtatctggtggtttatggcctgcgcaatgccggattaacggaatatctttctggcgtactcaacgtgctggcggataacggcctgtgggccgcgacgctcggcaccggattcctcaccgccttcctctcttctattatgaacaatatgccgacggtactggttggcgcgttgtccattgatggcagcacggcatctggcgttatcaaagaagcgatggtttatgccaatgtgattggctgcgatttgggaccgaaaattaccccaattggtagcctggctacgctactctggctgcacgtacttagccagaagaatatgactatcagctggggatattacttccgtacagggattatcatgaccctgcctgtgctgtttgtgacgctggctgcgctggcgctacgtctctctttcactttgtaatgagatactgatatgagcaacattaccatttatcacaacccggcctgcggcacgagccgtaatacgctggagatgatccgcaacagcggcacagaaccgactattatccattatctggaaactccgccaacgcgcgatgaactggtcaaactcattgccgatatggggatttccgtacgcgcgctgctgcgtaaaaacgtcgaaccgtatgaggagctgggccttgcggaagataaatttactgacgatcggttaatcgactttatgcttcagcacccgattctgattaatcgcccgattgtggtgacgccgctgggaactcgcctgtgccgccctagtgaagtggtgctggaaattctgccagatgcgcaaaaaggcgcattctccaaggaagatggcgagaaagtggttgatgaagcgggtaagcgcctgaaataaagcggcgatatcccccccacaggttgttagaaaagtgcgctttatttatgtcggatgcgacgctggcgcgtcttatccgacctacaaagttatgaaaattcgatgaatagtatgttatttgtaggcctgacaggcgtagcgcatcaggcgattttgctatttacacagtactccctgcgtgagattccaattatcgcgtccagcatggtgtatcagtgagctgcttagttatcagcgatacagcgcagtagtttaaagacgtactggattatgatttatcagtggtttacacaacaaattattaaataattataagataccttaacccattttattattacacatctaaaacatcacaaaaaaaaatcacttcacacactatcagagaacataataactttttaaaatgagcgcattttgatagttgttaacgatttcctttacgatactatcactaccctttttttacacacaaatattaccgggtggagataaaagggaaatcaaaggtaattatatcaggaagatataacgcattacatttattgtgtgtagaagaaaatccattcctgttctaattatccaatttaaacatcttagcataaaacaaatgatgaataaggaattttatattgattattagcactttataatcattgaataaaaatagattttatgtacttttaaaacaatgcactatattatggggtgatggatattcatgtcacgccccaaaattaactgagttcacctaaacagaaaggatataaacatcagacaggtttacgttactatcaggcatatcacctcagaatcagatgaaaactataaagaaatatctattatggttttaatatttgttgataaggatagtaacatgaacatgacaaaaggtgcactcatcctcagccttagttttttgcttgccgcatgtagtagtattccgcaaaatatcaaaggcaataaccaacctgatattcaaaaaagttttgttgctgttcataaccagccggggttatatgttggtcaacaagcgcgctttggtgggaaggttatcaacgttatcaatggcaaaacggatacgttgttagaaatctctgtattaccgttggatagctatgcgaagcctgatattgaagccaactatcagggccgactgctcgccagacaaagcggcttccttgatccagtgaactatcgtaatcactttgttaccatcctcggcaccattcagggtgaacaacctggctttatcaataaagtcccgtataacttcctggaagtgaatatgcagggcatccaggtgtggcatttgagagaagtggttaataccacctataacctgtgggattacggctatggtgcattctggccggaaccgggctggggtgcgccttactacaccaatgcggtgagtcaggtaacacctgagctggtcaaataacaccaccgaaagatgcagatgctttctcagcatctgcatcatgcattacatcaaattaatacacagtaagctaactattattattataagccctgtcctgttaattacctttggcaaactgattataaagttaatgtccgcaccaggagtcggttatgtttcttataattaccagggatacgatgttcttcaccgcgatgaaaaacattctgagtaaaggtaatgtcgttcatatacagaacgaagaagagatcgacgtaatgttgcatcagaatgccttcgtcattattgatacattaatgaataatgtatttcattctaattttctcactcaaattgaacgattaaaacctgtccatgtcattattttctccccctttaatattaaacgctgcctggggaaagtgccggtgacctttgttccgcggactatcactatcattgattttgtcgcactcatcaatggcagttactgctctgtgcctgaagcggctgtgagtcttagccgcaagcaacatcaggttctgagctgcattgcgaatcaaatgacaacggaagatattctggagaaactgaaaataagcctaaaaacgttctactgccataaacacaatatcatgatgatcctcaatcttaagcggatcaatgagctggtacgccatcagcatattgattatctggtgtgaatttcaggcttacggtgagtctggctacgctgccacacagattagctaatactaacgcctttcacccctgccataccttttaataatcgcaacaggtcttctatgctcgttgtggcatgaagctggatatcaatggcgaccacttcatgatcttcattttcctgcaagctaactaaatcagtttttattttttgctgcttaaaccagtcgagcatacttaccgtattaccgttcactaatgtcagctgtaaatggtaatttttgttcatcaggcggaaggttaattgatggaagacttccagcaccaacaaggtcatcacactaccataaatacccagttcgtacataccgctgccaataaccatacctatggcggcggtcacccagatatccgctgccgtcgtcagacctacaatattttggttacgaacgagaatgttacctgcaccgataaacccgacgcccgtcaccacctgagcagcaatacggctggggtcgagtccgacgtgatctaaagacagcacgtcagcaaaaccatatttgctaacaatcataaacagggcgcttcccatgccaattaatacatgtgtgcgtaaccctgctcctttgccgcgcatttgcctttccatgccaatagcgccacaggcaattgccgcgagtataagacgtataataaattctgctgtcatataaaaatgcaaaaaggagcagcaagatggctcaacttgctactcttttttacttgcacctcattaattcggcaagtcattagatgcttgatttttgaaggtatacaaatttttctgcgggtttttcttacagtattcgatcactttaggaatttgagtgagatcggtttcatttaaagtaacggtatcgccacctttatatactgtttcttcatgcagcatccaccatgcaaccggggtcattgcttttggattcagatcaataaattcctggcaggtcatatctttagcggattcattggctgccaacgcagattgtgcgttcaccagactcaaagccgctacagcgcccataaaaataaacgctttacggagagaactaatattcattttgtaacccattcaatatagagattatatatgaacaggaggaatagctgcttttaaagaagatattccggcctgttcaatatgcaaggaagtacgatgtaacgcattcccggaattacatatctttcttaattttgtcccattcgcctttaactttatctttaaagttggcttgtttatcctgagtacaagcctgaacgatagctggggttacggttgcaataccctgaacatctaaaaccgcatcttctggtttatctttgttgttcagcgcttcagcaaaaccaactgcagttggctggaaggattcgtccacagccaggaaatcttcacaggtccaggagttgaccggttttttgttatcagctgctttttgcgcatccgctgcattgctcacaactggcagaagaagcagaccaccaagaataacgcctaatacttttttcatcgtaatatcctcaactataaagtgaaagagccgtcacgaatcaatttcgacactgaggttataacctggttttctgtatatgtcatgttgatggaaaatatcaaaatcagatatttttatttcaatacaatgagttacagatgcatcagatactgcaattaggaaatttttattaaatcgactgcattcttagacgcgtttttggcatagattgatagcaggggattttcttcttaattttatagggtggttctatgttatatatagataaggcaacaattttgaagtttgatctggagatgcttaaaaaacatcgcagagcaatccagtttattgccgtgctgctgtttatcgtcgggttgctgtgtatcagtttcccgttcgtctctggcgatattttaagcacagtagtgggtgcattattaatctgcagcggtattgcgcttattgtcgggttattcagcaaccgcagtcataatttctggccggtattatccggtttcctcgtcgcagtcgcctatttattgatcggctatttcttcatccgcgcaccggagctgggcatttttgccattgcggcatttattgccggtttgttctgtgttgcaggggttattcgcctgatgagttggtatcgtcagcgtagtatgaaaggcagctggctacagctcgttattggtgtgctggatatcgtcattgcctggatattccttggtgcaacgccgatggtgtctgtaacgctggtttccacactggtgggaattgaactgatatttagcgccgccagcctgttcagcttcgccagtttgttcgttaagcagcaataattaccccggttgtcacccggatcatagtcacttgatgtgactatgatccgattaatactctctccgctacgcagtgttgtagatcaattgcgcactatcattgaaataattacctgctagtgattatttcaacctactgaatttcatctaatttttttcactctatggcaaattagccatttcaaacattatcatggctgatattttccgtagtcaggtttaatgttttaaaagtgctgtgggaaagtgaacaaagagttccgtaagcgttgatgctatgggcggttaaataagtaatccgggttcatttttttgcaactggcgttgattacattgcataaatatccgtgtctccagacgctatataaaaacctgaagacatgaatgcgttatttactcaggtaatttcaatgcgttaaaagaaagctggcaatccaattgccagcttaagtcgaaacaaggagactcgatatttaaatcggattacattttaactttagtaatattcttcagagatcacaaactggttattgataacttattcttgggcagtaatccgcaaacgttaactttttgtttgctatttacaagctgataacaaccaggaatcttacttaggatcaatatatggagtgcgtgatggataaatctgaagtattgattagtgttaatagacgtattagttcacgaagggtaaagttcttataggcgtttactatattgaacaacgattcggacaaggatgtaaataatgaaaaggatgacatattcgaaacgataacggctaaggagcaagttatgatttttctcatgacgaaagattcttttcttttacagggcttttggcagttgaaagataatcacgaaatgataaaaatcaattccctgagtgagatcaaaaaagtaggcaataaacccttcaaggttatcattgatacctatcacaatcatatccttgatgaagaagcgattaaatttctggagaaattagatgccgagagaattattgttttggcaccttatcacatcagtaaactaaaagctaaagcgcctatttattttgttagccgcaaagaaagtatcaaaaatcttcttgagattacttatggtaaacacttgccccataagaatagtcaattatgttttagtcataatcagttcaaaattatgcaactgattctgaaaaataaaaatgaaagcaatatcacgagcacgctcaatattagccaacaaacattaaagattcagaaattcaacattatgtacaagctgaaactaagacgtatgagcgacatcgtcaccctgggtatcacatcttatttttaatcaggacataagcaactgaaattgatggctggcatgacgagggatgcagatgctgatttcattacccccggtgattactaaaggagaggctaaaacgactttattcccctggtatgtgtatccaccagtagaacccttcgttgcccgaatgctggcaggaactgttggcagaacggcaacattttttttgtcgttgacctcaccatgtcgatcactgtgcctgtatcccaccttactggctgacaaccccactatgccgctggtctgtaaatccctcatatctctcctcgcgcgcaatttaaagaaccgttatttctcaagaattttcagggactaaaatgaacagaagaagaaagctgttaataccgttgttattctgcggcgcgatgctcaccgcctgcgatgacaaaagcgcggaaaacgccgccgccatgacgcctgaggtcggtgtcgtcacactctcccccggtagcgtcaatgtgttgagcgaattgcccggtagaaccgttccttatgaagttgccgagatacgtccccaggtgggcggtattatcattaaacgcaactttatcgaaggcgataaagtgaaccagggcgatagcctgtatcagattgatcctgcacctttacaggccgagctaaactccgccaaaggcagcctggcgaaagcgctctctaccgccagcaatgcccgcatcacctttaaccgccaggcaagcttgctgaagaccaactacgttagccgtcaggattacgacaccgcgcgcacccagttgaatgaagcagaagccaatgtcaccgtcgccaaagcggctgttgaacaggcgacgatcaatctgcaatacgcgaatgtcaccagcccgattacgggcgtcagcgggaaaagcagcgtgaccgtcggcgcactcgttaccgctaatcaggcagatagcctggttaccgtacaacgtctggacccgatttatgtcgatctcacgcagagcgtgcaagatttcttacgcatgaaagaagaggtcgccagtgggcaaatcaaacaggttcagggcagtacgccagtacagctcaatctggaaaatggtaaacgctacagccagaccggcacgctgaaattctccgacccgacagtggatgaaaccacgggctccgtgacgttacgggcgattttccccaacccaaatggtgacttgctgcctggcatgtacgtcacggcattagtggatgaaggtagccgccagaatgtattactggtgccgcaggaaggcgtcacccacaacgcccagggtaaagcaacggcgctcattctggataaagacgatgtcgtgcagctacgcgaaattgaagccagcaaagccatcggcgaccagtgggtcgtcacctctggcttgcaggctggcgatcgggtgatcgtttccggtttgcaacgcattcgtccgggtatcaaagcacgagcaatttcctccagccaggaaaacgccagcaccgaaagcaaacaataacgttgcaggcttaaggggactttcatggctaactattttattgatcgcccggtttttgcctgggtacttgccattattatgatgcttgcaggtggtctggcgatcatgaacttaccggttgcgcagtatccgcagattgcgccaccgaccattaccgtcagcgctacctatccaggtgccgatgcgcaaacggtagaagacagcgtcactcaggtgattgagcaaaatatgaatgggcttgatggcctgatgtacatgtctagtaccagtgatgcggcgggcaatgcctctatcactctgaccttcgagactgggacatctcctgatatcgcacaggttcaagtgcaaaataaactgcaactcgctatgcctagtttacctgaagcagtgcagcagcaggggattagcgtcgataagagcagcagtaatatcctgatggtagcggcgtttatttctgataacggcagcctcaaccagtacgatatcgcggactatgtagcgtctaatatcaaagacccgctaagccgtaccgcgggcgttggtagcgtacaactctttggttccgagtatgccatgcgtatctggctggacccgcaaaaactcaataaatataacctggtaccttccgatgttatttcccagattaaggtgcaaaacaaccagatttccggtggtcaactgggtggcatgccacaggcggcagaccagcagctaaacgccagcatcattgtgcagacgcgtctgcaaacgccggaagaatttggcaaaatcctgttgaaagttcagcaagatggtagccaagtgctgctgcgtgatgtcgctcgcgtcgaacttggggcggaagattattccaccgtggcacgctataacggcaaacctgctgccgggatcgccatcaaactggctgccggagcaaacgccctggataccagccgggcagtcaaagaggaactgaaccgcttaagtgcctatttcccggcaagtctgaagacggtttatccttacgacaccacgccgtttatcgaaatttctattcaggaagttttcaaaacactggttgaggctatcatcctagtcttcctggtcatgtatctgtttttgcagaatttccgtgccacaatcatcccgacgattgccgtaccggtggttattctcgggacgtttgcgatcttgagcgcggtcggtttcaccatcaacacgttgactatgttcgggatggtgctggcgatagggttactggtggatgacgccatcgtggtggtggagaacgtcgagcgtgtcattgcggaagataagctaccgccgaaggaagcgacgcataaaagcatggggcagatccaacgtgcgctggtcggtattgccgttgttctttccgcagtgtttatgccgatggcctttatgagcggtgcaaccggggagatctaccgccagttctccatcacgctgatctcctccatgctgcttagtgtatttgtggcaatgagcctgacccctgccctgtgcgccaccattctgaaagccgcgccggaaggcggtcacaaacctaacgccctgttcgcacgcttcaacacgctgtttgaaaaaagtactcaacactataccgatagcacccgcagcctgttgcgttgtaccggtcgctacatggtggtctacctgctgatttgcgccgggatggcggtgctgttcctgcgcacgccgacctctttcttaccagaagaggatcagggggtatttatgaccaccgcgcagttaccttccggtgccaccatggttaacaccacgaaagtgctgcaacaggtgacggattattatctgactaaagagaaagataatgtccagagcgtgtttaccgttggcggctttggcttcagcggtcaggggcaaaacaacggcctggcgtttatcagtctcaagccgtggtctgaacgtgtcggtgaggaaaacagcgttaccgcgatcattcagcgggcaatgattgcgttaagcagtatcaataaagccgtcgtcttcccgttcaacttacccgcggtggctgaactgggtaccgcgagtggttttgatatggaactgctggacaacggtaacctggggcacgaaaaactaacccaggcgcgaaacgagctgttaagtctggcagcgcaaagtccgaatcaggtcaccggggtacgcccgaacggcctggaagatacgccgatgttcaaagtgaacgtcaacgctgcgaaagctgaagcgatgggcgtggcgctgtctgatatcaaccagacaatttccaccgccttcggcagcagctacgtgaacgacttcctcaaccaggggcgggtgaaaaaagtgtatgtccaggcaggcacgccgttccgtatgttgccggataacatcaaccaatggtatgtacgcaacgcctctggcacgatggcaccgctttctgcctacagctctaccgaatggacctatggtagtccgcgactggaacgctacaacggcatcccgagtatggagattttaggtgaagcggcggccgggaaaagtaccggtgacgccatgaaatttatggcagacctggtcgctaaacttccggcaggcgtcggctacagttggaccggactaagctatcaggaagcgttatccagtaatcaggctcctgcgctgtatgcgattagtctggtcgtggtgttcctcgccctcgccgcactctatgagagctggagtattccgttcagcgtgatgttggttgttccgttaggcgtcgttggcgcattactggccaccgatctgcgcggcttaagtaatgacgtctacttccaggttggtttgctgaccaccatcgggctttccgccaaaaacgccatcctgattgtcgaatttgccgttgagatgatgcagaaagaagggaaaacgccgatagaggcaatcatcgaagcggcgcggatgcgtttacgcccaatcctgatgacctctctggcctttattctcggcgtgctgccgctggttatcagtcatggtgccggttctggcgcgcaaaacgcggtaggtaccggcgtgatgggcgggatgtttgccgcaacagtgctggcaatttacttcgttccggtctttttcgttgtagtggaacatctctttgcccgctttaaaaaagcgtaacgtgtaaatgagagtaaggttgaacatgaaggttcagccttactctttcctgctaaccattcaccactcaacaaccagctaaccgtcaggaataccaggcttagtacacagcactgaaagtagaaaccactccagccattcgtcatcaatttgaacaacacaatactgacccacattcccgtaatcgtatgaattgtcagcttaataatcccaaacatgccgagtcttttcctcctgaaaataccgataccgcctggcaaactgcgaaagagaactagccggtagcccggcagaaatcatcagggaagagtttcacatgaagcaggtgtgagatcctgaccaatattcaaatgcgaaatatgtcaggaaaaggtacctgggctatgttgcgcaaactgatgtggcgttacaccataatattgtcgaaatgtgtttataaagtagcttgtactgctatagccacatttttccgcaatagtatgcagaggaatttgacgtaactcgagtaatcgtctggccatgctcatcctggaggcgagtaatattttactgaaacaggtattttcatcctgcaacttttttttgattagactctcgctggtatacattctttccgcgatatcgcgcagataccaacgtttggcgatatcaaagctaataaggcgttcaacttttccactaacagtgctgatgctattgaaaagtaaggggatcagttctttcttatgagaaaacatgcttaaacaggaaaggtagagcatattgctcagtatcggactatttaccccggattcattgaagctatcaaaaatcgccgtcaccagcggcatggggggactctggttaattaacaaacggtctttgctgtgtaaccctaaattgcgtggtagctgacgaatattttgtaagtaatggcaaactgtcagctcatcgatatccagtcgtcgcgtatccggactacaaaacgcaaaatcgtctgccaaatttttctccagcagcagaatactctcgttatgcaggcttattttttgctgttcatgataaatatcgaaactacgacgaatgaggatcacgctgcagacatgagtcatgattatcccttatatttcatactgcgattatttcaatttcagtatactaatgaaatgatgccagactgtttcttagcgcaaaaactgccagatttggtaggaccaaaatttatccacaaagtagttttgcataacagttaattgataataagtaaatgcagcacgaatatattttcgcacagcgtatagcttatgtttataaaaaaatggctgatcttatttccagtaaaagttatatttaacttactgagagcacaaagtttcccgtgccaacagggagtgttataacggtttattagtctggagacggcagactatcctcttcccggtcccctatgccgggttttttttatgtctgagtaaaactttataatcttattccttccgcagaacggtcagtgccgtaaaaattcccttgcgcaacaatacttgccgcgctgtcacggttgctcaatctctgcgcgcttcgctcctgatactctgtgggcgtcatcccataataatttcgaaagacgtaaatgaaatagctcacgctgtgatatccacaggatactgcaactcgcttaatactaaaaccatgtataacaataagttgcaaagcacgttgcattctacactcagtaagcaactgactataacttgtctcttcttcgcgcaattttttctttaacagacttggactcatcaacagctcgctggcgattcgggctagtgtccactcatgggcgatattattattgataaccgtacaaactcgtgttcgcatgttcggttgtaaaacgttcagaagcagcggtataaagtgctcatcctcaagaaaaacagataacaacgcaaagattaatgctcttttacgtagcatttctgcatagcgaagattcttattctggcttagttgcgcaacttcctgaaaaacaggaatatctctactacagtgatgaacgagtaaactagaaacttttttatgtgcatgaagatttaatgcctcctccttgagcatcgggagaaataaactaagcgtgtccctactcacgaatacaaaattttcaacacacttatctactcgaatttggcttgcatccgcaaaaaccaggtcaccgccattaaaatagcgatattcaccattaaccatggtgagaatatatttatgtcttgcatacgcaattagacaattcccatgtagactttgcatagttgacttaatattacataaacatattactgtttattaatgtagcacgccgccctcttaagtcaaattgattgataaataaatttaaacgaagcgggagaacaggatgataatgtgtgatgttctacgggcaggatgactggatttataatacaaaaacgtgtttaagaacacagggaaattaatagtaagcaaataatcccttttcgtgacattaaaggtaatcgctacatttaataaacattcatataacatatatcttatcaacacgatgaatagacagccaatatattattgcgattaataagcaaccgaatgcccagctgtttttttaaaggctgggcattcggtttttacaacgttatgttatcaggtgtgtttaaagctgttctgctgggcaataccctgcagtttcgggtgatcgctgagatatttcagggaggctttgtagtcttccagcaacagttcagcaaagtccatttcgaagccgcgacgacacataatgcgcatcaccacgatgtcggtggcttcaccgccgagagtgaaggccggaacctgccagccgcgcagacgcagacgttcagagaggtcgtacagggtgtatcccggatcttcaccatctttcagtttgaagcaaaccgccgggatgccttcgtccgggcgacccgtacagatgaactcatacggccccagtttggcgatttcatccgccagataagcggcaacctggtaagaggcgttctgtactttggtatagccttcacgaccgaggcgcaggaattcatagtactgtgcaattacctgacccgccgggcgggagaagttgatggcaaaagtaccaatttgaccacccaggtagtcaacgttgaacaccagttcctgcggcagcgcttcttcgtcacgccagataacccagccgcagcccagcggagccagaccgaatttatggccactagcactgatgcttttcacacgcggcaggcggaagtcccagacgatatccggggcgacgaacggtgccaggaagccaccgctggcagcgtcgatgtgcatgtcgatgtcgataccggtgtcggcctggaatttatccagcgcatcgtgcagcggttgtgggaactcatagttaccggtgtaggtcacgccgaaagtcggcaccacgccgatggtgttttcgtcacaggcttcaatcatgcgtttcgggtccataaacaactgaccggggcgcatagggatctcacgcagctccacatcccagtagcgggcgaatttatgccagcagatttgtaccggaccgcacaccaggtttggtttatccgttggtttgcctgcagcttccatacgcttgcgccaacgccatttcatcgccatcccgccgagcatacaggcctcggaagaaccaatggtgttggtgccaacggcctgaccatttttcggcgcaggcgcatgccacagatcggcaaccatatttacgcaacgcaggtcgatggctgcggattgcggatattcttctttgtcgatccagtttttattgatgctcaaatccatcaatttatggacgttttcgtcgtcccaggtctggcagaaagtggccaggttctgacgagcgttgccatcaagatataattcatcattgataatctgaaatgcgacatcatcgcgcatttcgtgcagcggaaatcgtttactctccgcgatagtagaaatggcctttgcgccaaaacgactatcgagtagttcactgcggaaatccgttaacagcttctggtccatttcgaactccttaaatttatttgaaggcaataaaaaagtaggatttatccgcaatggaagcaaggcattacaggcttaatttaaataacaaaatcctaagcagaaaaacgactttttataatataaacatttaacatgataatattaaaaacagactttattatcgtaataaaaatcgcccaaacattgctgttcgggcgatcaaattaattattgtttatcctgcatatacggcgtgtacaccccgttcagactgtgcaggaaagctacgatatcatccacatcctcctgcggcagctctttgcctacctgatagcgcagcatcagtttcaccgccccgtccagcgtcggcacgtcaccgcgatggaagtacggtgccgttaaagcaacgttacgtaaaccgggtactttctgacgcaatttatcacgctcttctttagtcacattcatacgaccaatatccgccgccgtaatttccccaaagttaaagtcttttttcagccccaacggttcaaaggaacgtccgccgagaataataccaccatgacaagttgcacatttattatctttaaataattgatagccttttttctgttgcgccgtcagcgcattttcatctccgcgcaaccatttatcaaatggggaatccggcgtaattaatgttttctcaaattcagcaatggcatcagtaatattttcgccactgaaaccttgcggatagacttcgaggaactgcgttttaagctgcggatctttttccagcttagcaataatttcgtcccaggatttgctcgccatttcaatcgggttcaacggcggtccaccagcctgatcctgcaatgttgccgcacgaccatcccagaactgctcaacgttaaatacactgttaaataccgtcggcgcgttaatcggcccaactgcgccaccaacaccaatgcttgtttttctgccatcgacgccccccgcattcaacgcatggcaatgagcgcaactaatggtgctatcagcgcttaaacggggatcgtgatacagcgcaaaacccaacgccactttttgcgcatcggtaggcagtttttgcgggatgggctgcaccggttcattgcgatgttccggagcagtatcattgctggcgtaatattccgcgcgctgttttgcaatccaggccagtatttccgcccgctcttcatcactcaccttacccgcccagtgtagcgcggtataacgcgttggtggcatagtttcatactgcatcacccattcaatcttattcaaatcgctttggctaacgggtttatcagccagcagtgccgcacgcacggcctcaaggttaaaagatttatatccaagcttaatgtcgtaatccatcaactgtttcgcgccaggaatataataataggcgggtaattctgcgctaggcgtgtggcaatagtcgcatcctttttcgcggagaaagcctaaaaccttattattttcactgacagcagatgcctgaacatcggcctgtttactgcgtttattatcgtggtaccacacataaccagataaccctaaatagcaaatcgcgacgccagccaggccgatcgcggtaatacgactgaccattttcattattcttccctcacggtggtgagttattgtgacccagaaaattttccagaatgctgcaaacgtctctgcgagacaaagccatcataaaaaacagggagatacgctttttgataggaatcaatcaattacatgaatataaactatcaataagatagcctgtgcctattacccagatcaggaatggcatatcatgattgcggcgagagcaggattgaatgttctgaaaatgaaaaacaacaccaaatcggtatttttataaattccattgatattagtgcgttatattttttgacaggttaataaacgtgatccaccgcacgctttgtcgcccaccaggcggagcgaatgactacccttaaagaaaagccgataattagcgacgaatttcggaggttggatccttatgctcaatcagaaaattcaaaaccctaatccagacgaactgatgatcgaagtcgatctctgctatgagctggacccgtatgaattaaaactggatgagatgatcgaggcagaaccggaacccgagatgattgaagggctgcctgcctctgatgcgctgacgcctgccgatcgctatctcgaactgttcgagcatgttcagagcgcgaaaattttccccgacagtaaaacctttcccgactgcgcacctaaaatggacccgctggatatcttaatccgctaccgtaaagtgcgccgtcatcgtgattttgacttgcgcaagtttgttgaaaaccacttctggctgccggaggtctactccagcgagtatgtaagcgacccgcaaaattccctgaaagagcatatcgaccagctgtggccggtgctaacccgcgaaccacaggatcacattccgtggtcttctctgctggcgctgccgcagagttatattgtcccgggcggccgttttagcgaaacctactattgggattcctatttcaccatgctggggctggcggaaagtggtcgggaagatttgctgaaatgcatggccgataacttcgcctggatgatcgaaaactacggtcacatccccaacggcaaccgcacctattatttgagccgcagccaaccaccggtttttgcgctgatggtggagttgtttgaagaagatggtgtacgcggtgcgcgccgctatctcgaccaccttaaaatggaatatgccttctggatggacggtgcagaaagcttaatccctaatcaggcctatcgccatgttgtgcggatgccggacggaagcctgctcaaccgttactgggacgatcgcgacacgccgcgtgacgaatcctggcttgaggacgttgaaaccgcgaaacattctggtcgcccgcccaacgaggtgtaccgcgatttacgcgcgggggcggcctccggttgggattactcttcccgttggctgcgtgatactggtcgtctggcgagcattcgtaccacccagttcatccccatcgatctgaatgccttcctgtttaaactggagagcgccatcgccaacatcagcgcgctgaaaggcgagaaagagacagaagcactgttccgccagaaagccagtgcccgtcgcgatgcggtaaaccgttacctctgggatgatgaaaacggcatctaccgcgattacgactggcgacgcgaacaactggcgctgttttccgctgccgccattgtgccactctatgtcggtatggcgaaccatgaacaggccgatcgtctggcaaacgccgtgcgcagtcggttactgacacctggcgggattctggcaagcgagtacgaaaccggtgaacagtgggataaacccaacggctgggcaccgttacaatggatggcgattcagggatttaaaatgtacggcgatgaccttctgggtgatgaaatcgcgcgaagctggctgaagacggtgaatcagttctatctggaacagcacaaactgatcgaaaaataccatattgccgatggtgttccccgcgaaggcggcggtggcgagtatccgttgcaggatgggtttggctggactaacggtgtggtacgccgtttaattggtttgtacggcgaaccataatatttttacagccagccgctaacttcctgctggctgtaaaattatcctcttcaggaggagatatttaacatcattgccgcctgggtgcgatttttcacttccagacggcgatacagggattccagatgcgcttttaccgttccggtactgatattcagcgctctgccgatctccttattactttcgcccgccgctaacatggttaaaatctcccgctggcgggcgcttaagcttttgagatctttaatgtccttttccggcgtcgtccgccagtctccaggcagaaacatcatccccatcgccgcactatttaccgccaacgcaaatgtctcgacggtactatcacgaggcacaatggccagcacattaaaatggataacttcctgtaaccaccgtttattgcaatccgtcgccgtaattaacaccttaacctcaggaaattgcaccacggttttttgcagcaaccagtagcaaaactcaccatcctgatcgccatcgagcataactaaggcttcagggtaactttccagcttttgccataactcgtctgcctgactggccccctgaatactcactcctggaatacgctgctgtaaactgattttcattccatgaataaatatactctgcctgtcaaacatgactatttgcataactgaatctccacctgaatacgttaaaaagacttaagtagtggaagggtattacccgcgagaaaaaataagaattcgccatttggcggtggccattctacagagatgacgtgtagaaaatagttaccgatataaatagttacagctaaacgcctgaaattacatgtcgagggcactatttaaaacaattttgaggatttccttatattggtggttagtacgcatgcaattaaaaatgaaattccgcgaccacaagccaaaataacaaacggcaaggagacaaaaataagcacaaatagccaacacgtcctctgttcactttaaagggaatcgctgaaaaatacgctctgtttaaggggattcacctttctcagaaagctattccgcccttttcctgctgagaaatcgccacattcggcatgacaacattgtgaaacccggcattagatgttagaaaaaacaataaacaatgcgatatgcgcgttactgtttcgctgtgaacaacaaagcgtcaaagaaatggataaaattcacgcaatgcagttgttcatcaaagtcgcggagctggaaagtttttcccgcgcagcggatttctttgctttgccaaagggaagtgttagccgccagatacaggcactggaacatcaacttggcacccagcttctccagcgcaccacgcgacgggtcaaactcacgccagaaggcatgacctattatcaacgagcaaaagatgtgttgagtaatctcagcgaactggacggtctgtttcaacaggatgccaccagtatcagcggtaaattacgcatcgacatcccgccaggaatcgcgaaaagcctgttactgccgcgcctgagcgaatttctctatctgcatccgggaattgagctggaactgagtagccatgaccgtccggtagatattcttcatgatggttttgattgcgtgatacgcactggcgcgttaccggaagatggcgttatcgcccgtcccctcggcaaactgaccatggtcaactgtgccagtccgcactatctgacgcgctttggttatccgcaaagccccgatgatctgactagtcacgcaatagtgcgttatacaccgcacctgggtgtacatccgttaggttttgaggttgccagcgttaatggcgtccagtggtttaagtctggcggcatgttgacggtaaacagtagcgaaaactatctcaccgccggtcttgccggtctggggattattcagatcccgcgcattgccgtgcgcgaagccctgcgtgccgggcggcttattgaagtattacctggctaccgtgccgagccgctctcccttagcctggtttatccgcagcgtcgggagctttcccggcgtgtaaacctgtttatgcagtggctggctggcgtaatgaaagagtacctggactgaccgactatactttttaagaatgaccacgacagaaggacaaaagagcggatgacgcaggaaaacgagatcaagcgtcccatccaggatctggagcacgagccgattaagccgttggataatagcgagaaaggcagcaaagttagccaggcgctggaaaccgtcaccaccactgccgaaaaagtccaacgccaaccggttattgcgcacctgattcgcgcgacagaacgctttaacgatcggctgggtaaccagtttggtgcggctatcacctatttcagttttttgagcatgataccaattttgatggtgagctttgccgcagggggctttgtgctggcctcccatccgatgttgctacaggatatcttcgacaaaattctgcaaaacatcagcgatccgacgctagccgccacgttgaaaaacaccatcaacaccgccgttcagcagcgtacgactgtagggcttgtcggcctggcggtggcactttattccggcatcaactggatgggtaacctgcgtgaagcgattcgtgcccagagccgcgatgtctgggaacgcagcccgcaagatcaggagaagttctgggtaaaatatctgcgagattttattagcctgattggtttgttgattgcgctgattgtgacgcttagcatcaccagcgttgccggtagcgcgcagcaaatgattattagcgccctgcacctgaacagcattgagtggctgaaaccgacgtggcgattgattggcctggcgatttccatcttcgccaactatctgcttttcttctggatcttctggcggttgccgcgccaccgtccgcgcaaaaaagccctgattcgcggaacatttctggctgctattggttttgaagtgattaaaatcgtgatgacctacaccctgccaagcttgatgaaatccccctctggcgcagcatttggttccgtgctggggctgatggcatttttctacttcttcgcccgtttgacgctgttttgcgcggcgtggattgccaccgccgaatataaagacgacccgcgaatgccggggaaaacgcagccttaaaataggccggatgcggcgtaaacgccttatccggcatacgattttattcggcctggctccccgtaggccggataagatgcgccagcatcgcatccggctataatgcgcacataacctcttgaaactcgtccccagagcctcttcagccatctatttgggagcaaacaatttcattccaactcataaccccagcatataaatccagttggtaacttttatttaacctgaaaccagttttatccactatttataaaattatgtgaagcatttcatagaagaaaaatcactggcctaaacattatcccctttttgcctgatttttgaccatttccgcgatttgttacacattgaaatatcacttttgctgtgcgtaatatggctattcgttagccaaaaaataagaaaagattatgcaagcaacagccacaacactcgaccacgagcaagaatacacgccgatcaacagccgtaataaagtccttgtcgcctctctcattggcacagccattgagttcttcgacttttacatttacgccactgcggccgttattgtgtttccgcatatcttcttcccgcagggcgatcctacggcagcaacgctacagagcctcgccaccttcgccatcgccttcgtcgcgcgccccattggctctgccgtttttggtcattttggcgatcgcgttgggcgtaaagcgacgctggtcgccagcttgctaacgatggggattagcaccgtggtgattggtctgctgccgggctatgccacgattggtattttcgccccgctgctgctggcgctggctcgatttggtcagggtctgggcttaggcggtgaatggggcggcgcggcgctgctggcgactgaaaacgccccaccgcgcaaacgtgcactgtatggctcctttccgcagctgggcgcaccgattggcttcttctttgccaatggcactttcttgctgctttcctggctactgaccgacgagcagtttatgagctggggctggcgtgtgccatttatcttcagcgcggtgctggtcattatcggcctgtatgttcgcgtgagcctgcatgagagcccggtgtttgagaaagtcgctaaagcgaaaaaacaggtgaagatcccgctgggtacgctgctgaccaaacatgttcgcgtaaccgtactgggtacgttcattatgctggcaacctatacgctgttttacatcatgacggtctactctatgacctttagtaccgccgccgcgccagttgggcttggcctgccgcgtaacgaagtgttgtggatgttgatgatggcagttattggttttggcgtgatggtgccagtcgctggattactggctgatgcctttggtcgccgtaaaagcatggtaatcatcaccacgctgatcatcctgttcgcgctgttcgcctttaacccactgctcggttctggcaacccgattctggtttttgccttcctgctgctggggttaagtctgatgggtctgaccttcgggccaatgggtgcgctgttaccagagctgtttccgacagaagtgcgttacaccggagcaagcttctcttacaacgtagcgagcattctcggggcttccgttgcgccatatatcgcagcctggttgcagactaactacgggctaggtgcggtggggttatatctggcggcgatggctggcttgacgttaatcgccctgctgctgacccatgagacgcgacatcagagcttgtaataagagtgaaaagcctgatgcgctacgcttatcaggcctgaatttccatacaatatattgaattcgcaaggatttgtaggccggataaggcgttcacgccgcatccggcatgaacaaagcacactttgccaacaatctaaatctgtttaattgccggatgtcagacatccggcaattatcatcacttcttcatctggctcaaaatcgtccgacactgattagcctccccttcggaaggactgatcagtgccagtaacgccgccgccggtgttaccagcgttgccagtgccgcagcaacagcaccacgggcaatcagcggtccggctttcaccccagcctgcggatttttaaacgtcccccgcacatacagcgggctacgcagtgtgataatccgaattcctttactctccggatcaatagtcaaatccagctgttcgctagcaaaacttgccgtgccggtaacattaatcaacgcgttctcagtatcgaaagcaaaaatctgcgggcgcgccacgccgttggcaatattcagattcgccgccgcgcagttcacccgcacctcatcatcaccaaatatcgcaccgacaatgtagttgccgacattcagcccaacaatctccatcaggttgcggctcaccagcccgtcattcatcaacagtttcaggttgccgttactgttgcctaaaagtgccgccacgctgttaccgctaccgcgtagttccgcgtcaccgttcatttcccccagcgtcttctgcatcagttccacatcgggcatcagttctttcagtttcagtcgacgagcctgaatatctgcccgcccctgcatcggctttttatcgccttccagatgaatattcgccgcaatgctgccgcccgccatgccaaatttcagcggttgcaggcgcaggtcagcatttttgaggatgatatgagtagaaagatcgctaatcggcaggctactgccatgctcaatgcgccgccctttgaagcgaacatcggcatccataacgtcccatttatcggtttcgaagcggtcataaggcagcactttgcccgcaggctgaacgcttttttcgcccttcttctgttcagaccgtttgctcttttctgcccctttcccggaatcaacgccaatcaacggtcccaggtccgccagccgcaattgccggctctcgacatcaccttccagttttggtcgtggctttccggtggtgtagaccagagaaccgtggatatcgctatcaccaattcgcccattaaaaccgcgataatcaaagacgctgcttttttcagtgtcgattttcgctaccagccgaccatccgtttcaaacggcggggtatcgggcagcagaacgcccgtcagttcatagagatcacccagactatcgccagaaaatttaagccgtaaatcgacaccgcccatcttcattgggtcattcacgacgccatcaaaagcaacacgggtgttaccagagcggaaatcagcctgtaccggaaacggcgtcccttcgccacgcagcgccagcataccgcctatttttcccgtacccgtgagcggttcaccgttatatcgtccctgcgccttcaggccaaaaacgtaatcgcccaccttttctttatccgctttacctttgcttccagtaacttcgctgaacggcagcggcttgcctaagggatcaacaaaaatctccagatccgctttgcttactttgtcatcaatggcgatccgcccttgatcgaaaagaatattatccagccgaaagctccatgcgctcggctttgcattcgcgtctttgttatcatcgttggcaagattaaacgtccagttattgttcttttcagagaggcgaatcaggcgcgcgtcgggcttttcgagcttgatccacggcagccagaccgttttggtcagcagcgccagcggggccagcgttgcctctacgcgtggcaaatgcaccatcgtgacttcgggaatatccggtggattgccaagaatgatgtcttccgcgtgtacatggggccacggcacccagctgcgccagccagtttcttgtttttgccgctcccacaccacgcccagatcgccacggatagcgaacggacgattcaactccgcagagactttctggttgatagtcggtttgagtcgattccagtcaaaagttgcaatcaaaatgatcgccacgacaatcaacaacaagaaagccccactaatcgcagcggttattttgcctgccttgctcatcgttcgcttcctcatattcttcctgtgccagtcctaaagatagtccagccaggcggaaaatgaggcagcttatagcgccagaaccgccgtattcagcgtttctatcggtgccgggcgactaagaaaccagccttgtgcggcgaatgcggggctgttctgaacatcacgccactcttccggcgtttctacgccctcgacaatcaccccgcgacaatagcgattcattagatgtaaaagctgagaaaagagtgtgcgtccttccgggctctgacgcagcatcacaaacagttctcgcgcgattttgatgtagtcataacgcacttcacttagcgcagagaaatttgccatcccggtaccaaaatcatccagccacagcgggccaaattcacacatgctggcaaaggtactatctttcggcagacggatatgctccaccagttcgaaacgcagccagggaagacgctcaatctggcgcaggatttttggttgctgacgcagggcgatgagcgtagggccatcaatattgacgcttgccagcaggccgtgctctataaagaagtcggctttttgcgccagcaaatcaatctgctctttcacaacctccatccgatggctgacggtgatttcagtaaaatagcgatccggcggcaggcgttggctagggttcaagggatgcgtgaccaccgttaatagctccacggccattaaccgcccgcatgtttgatagatcggctgccaggtgtaagcacgctcacactgcaaccaaaaacgccgttcctgcaagctctcgatgcttgcttcagggttgcttattcgctggataacctgccttatcatcaaagatgtcctgtgtttaaaagtgatgctgcccggactcgacaaagattatcggcgcgtaagggcagaactttaccgcctggccggggtaaatttcctcactccacaacggaatctttcaggaatacgttctggctcaaaaaaataatggaacactgttttaatatggttgaccagcaaaccaccacagcgcaaactaacgctaattttttacagatcaggttcacgactatgtccaaaaagattgccgtgattggcgaatgcatgattgagctttccgagaaaggcgcggacgttaagcgcggtttcggcggcgataccctgaacacttccgtctatatcgcccgtcaggtcgatcctgcggcattaaccgttcattacgtaacggcgctgggaacggacagttttagccagcagatgctggacgcctggcacggcgagaacgttgatacttccctgacccaacggatggaaaaccgtctgccgggcctttactacattgaaaccgacagcaccggcgagcgtacgttctactactggcggaacgaagccgccgccaaattctggctggagagtgagcagtctgcggcgatttgcgaagagctggcgaatttcgattatctctacctgagcgggattagcctggcgatcttaagcccgaccagccgcgaaaagctgctttccctgctgcgcgaatgccgcgccaacggcggaaaagtgattttcgacaataactatcgtccgcgcctgtgggccagcaaagaagagacacagcaggtgtaccaacaaatgctggaatgcacggatatcgccttcctgacgctggacgacgaagacgcgctgtggggtcaacagccggtggaagacgtcattgcgcgcacccataacgcgggcgtgaaagaagtggtggtgaaacgcggggcggattcttgcctggtgtccattgctggcgaagggttagtggatgttccggcggtgaaactgccgaaagaaaaagtgatcgataccaccgcagctggcgactctttcagtgccggttatctggcggtacgtctgacaggcggcagcgcggaagccgcggcgaaacgtgggcacctgaccgcaagtaccgttattcagtatcgcggcgcgattatcccgcgtgaggcgatgccagcgtaaacgcagcatatgcaaaaggctggataaagtgttacccctctatccagctcatccataaatacctgatggttgtgctaactcatcaccatcaggcattactgtgcaggtggaatatccgtcacttcaggatgtacgtcatccgtggcgacagaggtggtcgcagcggcggtagatggggccatgatttgatcccagaccgcctgcaacgctttcatgttaaattccggctcgcctttcggctgcagcagtattaacgccatatcattgctcaactgttgacgcagatcctgatttaacatctctaccgtcaggctattaaggaaatcctgccgcagtttctgatattgctccggcgcgatatcgacaacctgattttgcaagctacgcatccgctgacccatcagaatatcggtatcagctcgtgcataggcggcaaacagtttctgcagctccagtttcttttgcgccactaacgcattgaactcttcttccggcagacctttatcgcgaaccttcgccagttcacgcgccaccagattaaggttgctgttcagcttgtcgtttggactttcgatgttgatggcacactgcgcacgcagatacagcacacggcagtcaaatccaagaccgatgtctttgctgttactggcacttaacgcttgctgaacatgccagaacagcgcctcgcgggccaggtccgcacgccagtagcgcagcagtgcggcactttcacgaatcggctgccacggcgtatcccacatgatagataaccggtcctgacgcaccgcgtcagtcataatactcaccgcttccgcacgcagcggagaaagcgtcggcaccggagctggcgtttcacgtttgcctttcagttcgccaaacgttttgtttatttggtcgacaacgctgcgcgcatccacgtttcccaccaccagtagcgtcattgcatccggggtgtaccatttctgatagaaatctttaattttttccgcttcaacgggttgtttcagcggatcggcaggatcgtgacctaacaaggtactccctttcagacgatagcgccaccagccctctttagtatcggcaggccaggttgccaccatgtcctgactttgcagcgcgtggttgatggtttctggtgtgatggtcaatttgccagtggcatttgccagataagagagcgcttctttcagcaaatcgttacggttattgggcaaactcagattaaacagcgtggtgtcataagagacaattaccggcggcatcgggcgtttagggtcgatcccctgctgccacaaactacgcgcctgtgctgcgtcaaggccaccgctttgcgttagcgcaatacgagggatggcgtgactgtaaccgctctgttgtgtactttcggcgaggctaccggtattaaccagcaggcgaatttcaacacgatcgctgggacgctggggggtggtcagcacttgccactgtaaaccgttggaaagcgtcccctgttgccatgctggatcaggctggagcgcatctgcctgcacatagccagcagtggccatcatcagcaaaccgcccgctaaaagtcgaatttttgtgccctgcatgtgaacccctgatcaactatcctggtaataaaaaaactgcccgttgtcggtcagtctaaatgacgttaaaaacacttcgtgttagaccgcaagaacatgaaaatgtcacggaagaagtgaaataaacctgaactcacccaggtggtaagttcaggcacaggggtcaattatgcgcaaacacccgcactcggggaagggagtgcgggcataagtgatgagattaagaggataattcgtgcgttttgccatccggcgcacgattattcagcacatcgtccagttttttgtggtccagttctttcacccacttagcaacgacaatggtcgctacgccgttaccgaccaggttagtcagcgcacgagcttcactcataaagcggtcgataccgaggatcagcgccagacccgctaccggcaaatggcccaccgcagagagcgtcgccgccagcacgataaagccactacccgttacccctgccgcccctttagaagaaagcagcaacacgattaacagcgtgatttggtggacgatatccatctgactgttagtggcctgggcgataaacaccgccgccattgtcaggtatatgcttgtgccatcaaggttaaagctgtagcctgtcgggatgaccagccccaccacgcttttacggcagccgagtttctccatcttgtcgagcatacgcggcagcgcgctctcggaagaactagtccccagtacaatcagcagttcttcacggatgtagcggataaatttgaagatactgaaaccagtcgctttagcgatactacccaataccagcaccacaaacaggatacaggtaatgtagaaacagataatcagctgccccagttgcaccagtgtgccgacgccgtatttaccgatggtaaacgccattgccccgaacgcaccaataggtgccagacgcatgatcatattgatgatgccgaagatgacctggctgaaactttcgatgacgttaaaaatcagttggcctttgctgcccagacggtggagcgcaaaaccaaacagtacggcaaacagcagcacctgcagaatgttaccgctggcaaatgcgccaatgacgctcgccgggatgacatccataatgaaggcgacaatgccctggtctttcgcctgatcggcgtaaaccgctaccgctttcgcatcaagcgttgccggatcgacgttcattccggcaccaggctgcacgacgttaacgatgataagaccaataatcagcgcgatggtactgacaatttcaaagtaaagcagtgcgactgcgccggtacgaccgaccgccttcatgctttccatgcccgcaatgcccgttacgacggtacaaaagatgacaggagcgatgatcatcttaatgagcttaacgaagccgtcgccaagcggtttcatttgctcgcctatttcaggatagaaatggccaaggagaataccaatggctatcgctgtcaggacctgaaagtaaaggcttttaaacagagaggttttcatagggtgtcctttagtaaaaccacaggtcttgtaaggttatggggtacctgcggccttaaaataacacccagacaacatcacagaaatgtacctggatcataattgaaacaaaaaggttaaaaagtttgagctggctcgcacaaaccagcactttttaaagttttgtaatcagtttggggtagttacttttcttccaggtaactctcttcgaagatttcaatagggagtgggcgagcaaaaaggaagccctgggcaataccaacgcccgcttttgccagccagtcgcgttgtgcttcagtctccacgccttcggcaatcatttgtaagttcaggctctgcgccagcatgataattgcagcaatcatgctgctatctcccggcaagccttcaacaaacattttgtcgattttcagtacgtcgattggcaagcttttcatatgctgcagctgacgcagccctgcgtagcccatgccgaaatcatccagcgccacccgaactccggcattgcgcagcggacggaggattgccaccgcagcatgagggtcgtcaatacgtcggctttctgtcacttccagaatcagtgttcccggctgaatgcgatagcgggttaacagttccagcatatccgccaccatattcgggtgcatcagttgcagcgcagagaggtttacgctcaagggcagcataatgccgcgctcttgccaggctgcaagcaatcgacaggactcttccagcacccagtgaccgacggtaaccatcagcccacagcactcaatgcgatcgattaagccatccggcaggtcccaactgccatccggttactggatacgcagtaacacttccgcactgaccagtttaccgctggtcatctcgacctgtggctgtaaccaaatagcaaactgatgattttccagtgcattaaggatatcgctctcttccgtcaaccgcttctgggcggcttccatctgctgcggatcaaagaactgaatctgattcttgcctttatggcgagcggtaaatgccgcagaaatagcgcgactgtaaagctgttcggcggtgagatcgccgtagaacatcgccacgccaatgctacagtgcggacggagttgaatacgttcaatcggcaggcgctcgctcatgatagtgagcacttgctgacctaaggtgattgcgtgccacggttcctgtacaccgttggcaatgacagcaaagtcataaccgctaatctgcgcgaggatcatacgtgggctcagtacgcttttgagtttttccaccagcgtcagcagcagaatttctcgttgcgcctctttcagcacgcccgcagtatcacgcagggtttcacaggtgatgatcatcagcgcggtggtttgtttacgcgcgacaacctgctccagcatctccatcagcaaggctttgttcggcaaatcgctcaccgggaagcgcatcgcattttcgttctgttcttcataatggcgctgcagcaattgctggttgaggttgtaactgcgcaccaacataccgatttcatcgtcctgatgcagacgcggtaatgccagttggtgaccaacaagctccttggctgggatggcgttaagttcgcgagcaatattgcgtaacggatgcaaaatcaggcggttaatgcaccagctgatggcgacggtcaggataaggctcaaaagtaagtaaatggtcactaacgtactgagggtgctcatcacgaacttatacatacggaaggaatccgcctgtagtaccagataggcaattggctgcgggtttgccggacgttcgaggctgtaaacgcccaggctgatttgaaccggtagctcaaacaggcgagtaaccattaccggcaccgggcgctctggaataaaacttttacgcagcgcctggaactggttaggcagcactacatcggcacggctgaccacgcctgccggtttaatgctggcaagaatagcttccgcttcgggaatatcgcctttcaaaatagcactagataagggttcgcggacagagcgagcaatgctttccagttgcgtagccgtgttatagcgattctgctggaccagatggaacagcaaaacggtgcaaaaaataaaaacgaacaccaggacaacggctgccaccattgccatctgcttgattgttaacgagcgacttacgcgcaaattgtctccccccggaaatcccagattgccgcccgagtatacccgatcgcagcggcattaagagaggcgctatctgaaaacttaccagtcggcgtaaggtatcagcggctgcggcggtaaatccatgtcaccctgccatccggcggcggaataacgtacgtagagcaggaaatggctgggtgcgtaatctttcgcctgctggatatcaattgccgtgccaacaaaccagttggaagtaacacgtcgttcaagtaatgcccgcgccgtgtagccgaagccctgactgctgccgccatcgttggattgccgcgcagcttcttcctgccagtcggtcgggatcagattcatcagcggataacgcggcatggttttggtgcgactatggctccagctgccagacgcacccagctcccagctccagttttccgtgcgctcccgccacatcaccggtatggcaaagctcaggtattcctgcggactgtagtaaccgccctgaccgagactgtagccactcagatctttgtcgtaatgccagatcatgttgttcaggccgattgtgacgcggcgattgttctggttaatgaccttatagtaatagcccgtcatccagcgcacgcgccagttatcttcgacatttttaccggttaactggtcgccactaaggcttgcccagacgccgtttgcttcacctttatcgtagctcagacttagccccacaccgtcggcacgtacgccaccccattttttcccggtattgctcggggagtctttttgcccaccaaaggccagcaaagaactggagatgggccgacggtgggcgttaacggtgtaacccagcggcccgatatcatcgctgtaactgatgccgccgaccacatccaccacgttgaagcccatcggcgtggtaccgatatcccagctccagacgtcatttcgccagccgaccgccacgctggcaccggaatcgctctggctgcggttgccgctacagtcctgtaatgtacaggtgccccagttgtcatcccatttgccatcggcattagtggagaaactgccgacgttcatattgacgaaatcactgcgaaagaacatccgcccgtcagaatacggcgcatccacctgcaacatggtagtgtgcgctttcagatcggagtaaccaccggtgccgctgctaccccagtaatcgtgctcaagggtgacgttaagatcctgctggcgatagaggtccgccgcatcgctgcgcacgccacgtttcagccagtcatctttctcgtcgttacgggtcagtcgggtaaaggtgtcgttatcctgcggacgcgtcgtagtcacaccggatgcgaccatggcgtctttgtaggtttccagcgcctgcgttggatcgcccgcctgcgcttcaaacttcgcaccatcacgcagcaccatcgcgctttccatgctcggtggctgagattttgcctgcgggatcaacttattaaacgtccgctgcgctgctgcggtatcgccaagctgcgcctgtgccagcgccacgcgccgctgtgtgttcaggctggcgttatcggtagcgggcagtttcgccagctggctacgtgccgccgctttgtcaccggcagcaatatccacttccgtcagaccaagaatggcgtcggcgttagctggctcccgcgtcaggacattctgatatgcagcgcgggcggcggtgtaatcacgtcgttgttgcgcccagtcagccagcgtgaggtcaatacgcgtggaaggtggttgctggcgcagcatcgcttccgcttctgcctctttgccgctttctcgcaggcggttagcggtttccagcacctgatcgctttgcagtcgattaaccagctcctgaatattgctgttccactgcgcacgcggcaggctattgatatgcgccagcgccgctctgtcctggtcatgaccagagaggtacagcccgtaagcgtaaacctgctccgggtcgttgctcttctgctgcgccagattgcgcattaacgtatcggcctggctgcgttgtccggcctgccagagatcctggctaagtcggtaagtaatccatacgctgccggggtccagcgccagtcgttgccgctgaagtgctgccgcctgcgcccatttgccctggttttccagtgcctctgcctgctgtgccagacggtcgttttgcaggctgcgttcgatatcatcaatgctacgccgctgactggcagagaggctggcgataaacgcttcagctttttctgggctttgctggcggtaaatatttgccagcccgcgcacggcgttagtgttgccgctgtccatacgcaaggtctgctgataataacgttcggcggcgggataatcttttcgcgccatcgccacatcgcccagccccagcactgcataactgtcggtgttatcgacattacgcgcctgctggaacaggcgttctgcccggtcaggattattggctttcagcgcagcatcgccctgctggatcgccagccagtagcggtttactttcagcagactgttccatttgtcgttgttgctgctgtgcgggtccagtgcgagggctttttccagattcgccactgcattggcgcgatcgcctttctgagaatacgcctggcccagcgcccccagagcttcactgtctttcgggttcgcccgcaccgcctgttgtagttcgggaatggctttacccgccataccagagtccaccgccgctaaaccttgcgcacgagcgcggaaagcaggatcggccagctgtttttgctgttctgccagttggctttgcgcagccgccacgctatcgccatcactaaagatgctgagatattttttcagcgcgctcacactggcatcactgacgggcatgtctttaatctgcccgtaccagattttagaggccccttcgcgcccggcgttgctttttgccatctgttccaggacggcaaaaccttcgtcacggcgatcgctactaaacagcaatagcgccagattgttttgcaggcccgtattgcccggtgcatccgcattgatgcgttttaactgattaatcgcttcgccacggcgagccggaattttcgccaccgtactccagtactcgacagcaatgtcaccttccggcggcgcaccgttgaacagtttgttgtaactcgccacagcttcttctgcatgaccggtcgtcgcctgcaatcgtgcctgttgcagtgcctgacgaccatccggcgtggaaagtagcatcgtagtccggctgcttttatacgcattactactcggcgctaactggctcagccgatcgagctgtttttgcgcgccatcaatatcgccctgacgtaacaaagaacggaaacgggcggcaacgacgtccgggttattcggatcaataagttccagccgatataagctctgttgcaccagatcttcacgatgggtcgcttcgcctaaccgaacttgctccagcaactgttgctgagcggttggtgctgcctcgaccatcggcatgacggccagaccgagggaaagcgtgaatatgtttagtgtgaatttgcgcattcctggccccagtcaggtaattactttagtgactatttgcgcattcctggccccagtcaggtaataactcaccttttgtgctgaagcggaaacggtgttgatcccagccttgtccaaacagggtcagcacatagttgtaataggcatcgctgccgggaaagttatcggccacgcgctggcgctgaacggcctgcgcatcgcggttttgtaaaaagggcagcatggcggcagaaaaaccgactggtcctttaccctgcgctttccccgtagccacatccactttttccggcggataaccgtttttctcagtgaatgtcgccatcggtttaaaccggttgagcatccgcgctttttgcggatcgctgtcaggcatcatgcctacccacatgtaaacgcggatagcgtcgtagctgctgatcaatgttttttcggcttttagctgccagcctttgtctttctcatagcgcacccagtctgggctaaaacctttcggggcggtttccagcaataaacgttgattggtttcgcgcagcgtggtccacggcgcgccaaagcgggtgaaatactgcgccagcgtcggcggcaggtagctggggttaaaacgccagctgttatcctcagcaaaacccactttgcccggtaacaacatggaacccagcccaggcaccgtcaccacttcctcccgcgcgatacgttttagcaacgcgctgccgatgtcggtataacgctgctctttccacaaacgccccgcctccagcaagctccaggccatccagacatcaccatcggaggcgctattgctgtccagcacttcccacttactgttctctttcttgccccacagccaggcgggcaaacgttcttttaaagaaccctgagcgagattgttctgcgtccagtcgagaatattatcgaaagctgcacggtcgttagccgccagggcagagaacatgccgtaactttgcccttcggaggtggtgattttgcgcgcgtcgctggggtcgatgacgcgcccttcctgactgatgtaatcctttttaaactgctcccaggcaggccaggtacaggctgcctgaacactaaaggcagccagcagcagcatcgtcacgattccactacgcaacacattcatcttcaattactcgttatccgggttaagacgacgacgactaataattcgcagcagacgccacagtacccatgccagcaatatcacactgatagccgccagcaccgccagcagaatcggatggtttgccagcgcataccacacgcgctcgaaccacggcagatgacctacgtaataaacgtcgccaacacgtaggctgttgataccggactcgcggatcaccgcgacgctaccgaacatggtggcgcgtttgccgctatcgttcaccgcatcgttaagcatttcataaccgcgtgggctatctgccaacagcgcaatcacgctgcgctggtcgttatacgggctctggaagccaatcaccgccgccatcgcaccggaagaggtcagcgtactccgggtttctgccgcgcgatcgctctcgtccggcacaatgccggggaacggggtctggcgcatcggtgttttcacccagctttcggtcgcctgcaccaataggtcgatctgcttatcgtctttcagtttgtccgggataccaccgatgatcatgatgtcggcatctttgccctgaatggtgctgccatcatcggtcaccgtcagattaatcgccgggaagcccgtctgtgcgccgataaaaccaacagtattcagcaacgtttccatctgtgcttcgttaggcgctttcggcatcacggtgatggtttggctcagatccgccatccggctgaatgggaagcccgcgttagcaaaggcgcgtagatccggcatcgggatgaagtggtaatacttgctgaagtcgatggtggagtcgtcaccaatcaccacatgattctgcaccggctggaaggtaatacagttatccacgctaccgcccggcatcgggttcatatactcaaagtcgaagcgcagctggttggtcgcgcccagtttcagcgccggaatagagacatctgttttgccatccagcaaaccttgtaataccggaatccgcagcagcaggcggttcgcctcctgtttgctgctcaggttgaaggattgcaggaactggttattcaggctgatatccatccggctactgtctttcaccggcggcatggtgtagcggtaattaatatccatatcaatgccggtactgcgcatcaggtagagatccggcggcaggtttaggctaacgttaatcgctgctggctcaagaccgctggattgtaactgttcttcataggttttcagttcgccaaatgtgaccggacgatcggtacgtacccagttcggcgcatcgtacggcttacgcggtagcagcggtttcacttcattcactaccacgctttcaccacggaacagaatgttaccctgagcgatacctttcgctgcctgcaacaggtctttgtcgtcacgaccaaacaccaccagcagtttgacgtaaggattctgcggatggttaatcatctcaatcaccggggcttttaccgccggatgatcgcgcaggaagtccggccgtttgtcgttggttgcaaagacaatggcattgcgatccggcagttggttatagagtaccgggaagttctgcccacgccagccagaacggctaccaaaccagctggcgacaatggcagaggcttgttgcagcccaacatccggcgcacccgcaaagaccatcggcaaggtgttggtgcggttatcgctcgggtcaaagaatggcaccgggaagtgactcaggtcattcttcacattcagggtctgataggtcagatccagtccactgctccgcccaacatccagccaaagcgtggtgctggccggtttttcgcacacgtcctgataatggccgacaaactccagccgtacacggttgaagtcgctaataaacagtgggttaatgggcatttgcgccagcgtttttttacccaactgttctttggtcactggcagcacgcccatcagttcatcattgagataaacctttaactggctctggacaggcagtaagcttgggcttggggtgtattcgaagttgagcatcgccttcgtcaccacttcatcgctgcgcataccaaactcaatgctgccgttcgggttaatgccacgtagcaccatgctgcccggcggcggtgcaatttgcgcaaaggtcagcttcacatcacggctaggaccgttctgcgccacgactggcgcatcagcgccctgcacgcccggcatcacttgccccacctgcggattttgttccgtctgggcggctacagctggctcagcattgatcagtggttgcgttgctggcgtcgcctgcgtcatgaaagaggggaacgcactcatccccatagccactgcacaaatccagaatagttttcttttcatcgcgttatcatcattgttgagccaaagcctgatcgcttggttgtgccgtttcgctccgctccgggcggcgcggaataaagcttacaacccaggaaaccagagaagtcagcacacggaatatgcccttcacgctagaaggcgcaaactccgccagatggcggtagccacggaagccgagcttcagaatatccagcagactttccagcggcttatcttccgggtagctgtcctgccagagcgcccatgtatccgcacgggcaaacgtacactgcacaaaatcgatatgttgctgggtggtgagcggcattaatttcagcccaacttcattacccatcacgcgcgccacctgggtcgggaagacgtattcctgctgaccgcgtttaagcaacagattcactttctgcccttccagaatctgcgcctgaccgttgatcttgatccccaaaccaccgtcggagaaatcctgaacggtacagctgaagaggtgaccatcttcgcgggcaattgccgcgggcatcgtcatctccacgcggtggcttcggcgtacctgtttgctttctacgcttaccgcaactgcgccgccaagaacaatcaggttgtagaacacccacaccatactgacgaccacggtgagcatctcggttggcgggccatagaagtagcgccagatgcctaccgcaacgcccaccaggttgagcaggacaaggaagatgtagggccggctgatcacccagtcgacgtactcttcttccaccagtccacctttggcggtgacgttaaatttgcctttgtgcgggttaatcagcgccaccagcgtcggtggtgcgatataccacgccagcaccgtttcgtagatttcactccagaaagagtggcgatatttgccctggatcttggagttggtcaggctggcatggatcatatgcggcagcacgaatagggcgatcatcaacgctggcgcatagatgatgtaggcatgaagcagcaggaacgccagcggcgcagtcaggaagatcagccgtggaatgccgctcaagaagtggaacatggcgttgacgtaacatagccgctgagcaaacttcagccctttaccggtgagcgggttatcgagacggaagatttgtaccatcccgcgcgcccagcgaatacgctgaccgatatgcgcgctcagactttcggtcgccagccccgccgcctgcggaatacgcatatacgcggaggtatagccacgacggtgcaaccgcagagaagtatgcgcatcttcagtcacggtttcgacagcaatgccgccaatttcatccagcggcttacgacgaatcaccgcacaggaaccgcagaagaaagtggcgtcccacatatcgttgccatcctgcaccagaccatagaacagcgtgccttcgttcggcgttttacggaaacgccccaggttgcgttcaaacgggtccggactgaagaagtggtgcggcgtctgcatcatcgccagctgtttttctttcaggaaccagcccatggtcatttgcaagaagcttcgcgttggtacgtggtcgcagtcgaaaatgctcacgaactcgcctttggcatatttcagcgcattgttgatgttgcctgctttcgcatgttcatgagtggtgcgggcgatatatttcacccccacgttttgcgcaaactggcgaaactcttccctgccgccgtcatcaaggatccagatattcagcttatctttcggccagtcgatacccaggctggcgtaaatggtatttttcaccacgttgagatcttcgttgtaagtcgggacaaagatatccacgctcggccacaggctcatatctttcggcaatggcaccggctgacgattcagcggccatactacctggaagtagccgagcaccagcacaatccacgcgtacgtttcagcgaagagcagaataagcccgcacaccaggctgaccggatcgtcccagttcagcgtagaggtgtaacgccaccagatataacggcaagaaacggtcaggctcagcacaatcaacattagcgcgctgaagcgccccggcatccgccgtacgatcagcgctaccccccacagcagcatcaggaagataaactgcgccagcgggttaaacggctgagtaacgcagattaacgccagaatcaggctgaaggtgacgatgataccgaggatcaaccgccgcgccccggcactcaaatgaccgagctcttttttctcatccagatgctgtgttttatggctaacgcgctcaggcagctcgttcatccattgatggtaacgtccacgaatattttgcagaccactaaatgcccgcctgcgcggtttcggcgtttctttgcggcttgcaccgatcaataaccagcatgtttgaatgagataacggaccgggtccagcggacgcggacggctggcgttgatatgcggatacaggtttttatgttctgcgcgaatacgctgccagcgcgggtgctccagcggaataaaaatccaggccaggatcatccagaaacagccgagcgtcgcgctgaaagcgctcgcaccgtgacgacgataatcgcgataacgcccgataagccgcgcgttgaccggcgggataagcaaccaccgggtcaggatactcatgatgcactcccgactggcgtttacatcaacttgcactcccgactggcgttttcagcccggagtagttcaacaggcaccagttcgccagcgtcagtatctcttcagccgccagcgcatcactgcgatattcacctactggttgcttagccgccaggcattcagccatcgcttcatcacgatgaatgagcatcggcagtaatcggcgctggctttgcaaccaaagctggtaaatatcgtcctgaacctgactgccaatacggaagtcattaatcaaaatatgtgcgccatccggcagcgcttgctgatgcagtcggatatggcagttggcatccacattgacgattgccaggctgtgatcgcacaaactcagcagctggtgggttatctggctggcatcacgcggtaagtcgattaaaatccactggtaacgcccgctggcttttagttgctgtaagccggagcaaatatcgctcagccgggtttgccagtgctgtggattttcttgttcttcaatggataactgaccaaaaggcagcaaatcgagctggctggtgtagcgcaacccagcgtcacgccagtcctggccatccagcatcgctctggcccagccctgacggtgggtaaaatcaacattaaaactcaggcgcaacaagttgtccgggcaggcatcgaccaccaggacattttctcccaacatttgtaaactccaggctaatgcggcggtgatggttgttgtccccacgcctccccgcaccccctgctatcccagtacggccattcaccaatcccttacttttgttgcgcaaactctgccagcaacggccagcgttttaatgccgcggccaactgttcgcgttgggaaatatcggcataatcaatatcaggcagactaaatgcctgctttaacgccacaatatcattctggaagatatagcctatcgcgggatcaggcagagtatctggttcattgttattcattttgcttgatccctatgaaataaccgtaccgttcatgagacaattctaaccgtgagcatttcgccggtttattgtttacggcgagacgggaatttgctcactttttgactttccgttacgcaacagaaaaagttaaaaacgaaaagactaaaatcacacgtcttgtgaccttctaaattgattcacatgctaaatctgataagttttaatttcaatggtaggtttatttcttagctttcgctagtaaactgataatcagacaaaatggtgacatgagggacattgtggaccctgtattctctatcggtatcagtagtttatgggatgagctgcgacatatgccagcaggcggcgtctggtggtttaacgtcgatcgccatgaagatgctatcagtctggcgaatcaaacaattgcatcccaggctgaaaccgcacacgtcgcggtcattagcatggacagcgatccggcgaaaatctttcaattagatgattctcaagggccggaaaaaataaaattatttagtatgctaaatcatgaaaaaggtctatactatttgacccgtgatttgcagtgttctattgatccccataattacctttttattcttgtttgcgcaaataacgcatggcaaaacattcctgccgagcggcttcgcagttggttggataaaatgaataaatggagcaggttaaaccattgtagccttttggtaattaatcccggaaataataacgataaacaatttagtttgttgcttgaggaataccgtagtctttttggtcttgccagtttgcgttttcagggtgaccaacatttgctggatattgccttctggtgcaacgaaaaaggggtcagcgcccgtcagcagcttagcgttcagcaacaaaatggtatctggacattagttcaaagcgaagaggcggagatccaaccacgcagcgacgaaaaacgcattctgagtaatgttgctgtactggaaggtgcgccgccgctaagcgaacactggcaactgttcaacaataacgaagtcctgttcaatgaagcccgtaccgctcaggcggcgacggtggtcttttctttacagcaaaatgcgcaaatcgagccactggcccgcagcattcataccctgcgtcgccagcgcggtagtgcgatgaaaatcctcgtgcgggaaaataccgctagcctgcgcgccaccgatgaacgtttgttattggcctgcggtgcaaatatggttattccgtggaatgcgccactctcccgttgtctgacgatgatcgaaagcgtgcaagggcagaagtttagtcgctatgtgccggaagatatcactaccttgctgagtatgacccagccgctcaaactgcgtggtttccagaagtgggatgtgttctgtaatgccgtcaacaacatgatgaataaccctctattacctgcccacggtaaaggcgttctggttgccctacgtccggtaccgggtatccgcgttgaacaagccctgacgctgtgtcgccctaaccgtaccggcgatatcatgaccattggcggtaatcggctggtgctgtttctcagtttctgtcggattaacgatctggataccgcgttgaatcatattttcccattgcctactggcgacattttcagtaaccgtatggtctggtttgaagatgatcaaatcagtgccgagctggtgcagatgcgcttgcttgccccagaacaatggggcatgccgctgcctttaacgcaaagttctaaaccggtcatcaatgccgagcacgatggtcgccactggcgacgaataccagaacccatgcgactgttagatgatgctgtggagcgcagtagttgatataagatgctgtggagcgctcatcatgatgaccatcagcgatatcattgaaattattgtcgtttgcgcactgatatttttcccgctgggctatctggcgcggcactctttgcgacgcattcgcgacaccttacgtttgttctttgctaaacctcgttatgttaaaccggccgggacgttacgccgcacggaaaaagccagggcaaccaaaaaatgactcaatttacgcaaaataccgccatgccttcttccctctggcaatactggcgcggcctttccggctggaacttctattttctggttaagttcggcctgttgtgggcgggatatcttaacttccatccgctcctcaatttggtgtttgccgcgtttctgctgatgccccttccgcgctacagcctgcatcgcttgcgccactggattaccctgccgatcggctttgctttgttctggcatgacacctggttgcctggcccggaaagcataatgagccagggtagccaggtggcggggttcagtaccgattatttaatcgaccttgtcacacgctttattaactggcagatgattggggccatttttgttttattagtggcctggttattcctgagtcaatggattcgcattaccgtttttgtggttgccatactgctatggctgaacgtacttaccctggcgggaccaagtttctccttgtggccagccggacaaccgacgaccactgtaacaacgacgggtggtaacgcagcggcaaccgttgcggcgacgggtggcgcaccggtagtgggtgatatgcccgcacaaactgcaccgccaacaacggcgaaccttaacgcctggctgaataatttctataacgcggaggcgaaacgtaaaagcaccttcccgtctagcctgcccgctgatgctcagccatttgaactactggtgattaacatctgtagcctttcctggagcgatatagaagccgccgggttgatgagccatccactgtggagccatttcgatattgagttcaagaactttaactccgccacctcctacagtggcccggcggcgatccgtttactgcgcgccagctgcgggcagactagccacactaatctgtatcaaccggcaaataacgactgctatctgtttgataaccttagcaaactgggctttacccagcacctgatgatgggacataacggccagttcggcggttttttgaaagaagttcgcgaaaatggcggcatgcagagcgaattgatggatcaaacaaatctgccggttattttgctgggctttgatggtagcccggtttatgacgataccgctgtgcttaaccgctggctggacgttaccgaaaaagataaaaacagccgtagtgccacgttctacaacacgcttccactgcatgacggcaaccattatccgggggtcagcaaaacagcggattacaaagcgcgggcgcagaaattctttgatgaactggacgccttctttactgaacttgagaaaagcggtcgtaaagtgatggtggtcgtggtgccggaacacggcggcgcgctgaagggcgacagaatgcaggtatctggcctacgtgatatccctagcccgtctatcaccgacgtccccgttggggtgaaattcttcggcatgaaggcaccgcatcagggggcaccgattgtcatcgaacaaccgagcagcttcctggctatctccgatctggtggttcgcgttctcgatggcaagattttcaccgaagacaatgttgactggaaaaaactcaccagtgggttgccacaaacagcaccggtctccgagaacagtaatgcagtagttattcaataccaggataaaccgtacgttcgcctgaacggcggcgactgggtgccttacccgcagtaagaacgaaaaaggccgcagagtttcccccctgcggcctggtccgggcgcaaattgccattacggcagcctgacgcccgcatgacacgttacttccgcttgttcagccagttcacgatcatactggcaagaatgccagcaatgaccggagccgctaaatcatgccagaaggccatgcccagctctgcgaacgtcatatagccgcctgtgttgtaatgacaacgtttcgcggctattcttgagtggtctagagtcaagattagcccccgtggtgttgtcaggtgcatacctgcaacgtgcgggggttttctctctccagcaaccaatgccaccagggataaagcccccgcaacattgcgcctcaccggaacctttccggcttgccgctgattctacgattgctttttactgtcagcacccggcaatcttcctcattgcgcgatgccttccagcttaatttctttatttgcaatagttgcagttcatatccgggctgactccagactggtagtgaaatgcgcaattttgtagaattgcgcctcctcgcgacctccccagtgaatctgttgcctcattttttacatactgcgtattcgacttctccacctgttgcgcaagagaaactgggtttattcatttttgcgaggccgacttctttctggacaggactttatgcagcacaacacactaagcaaacacaatcagaaattgccgtttacacgctacgacttcggctgggttttattatgcataggcatggcgattggtgccggaaccgtgctgatgccagtacaaattggcttgaagggaatttgggtatttattaccgcagcgatcattgcttatcctgccacctgggtagtgcaggacatttatttaaaaaccctttctgaaagcgattcctgtaatgactacaccgatattatcagtcattacctggggaagaactggggaattttcctcggggttatctactttttgatgattatccacgggatttttatctactctctctccgtggttttcgacagcgccagctacctgaaaaccttcggtttaaccgatgccgatcttagtcaatctctactttataaagtcgctattttcgccgtactggtggcgattgcgtctggtggtgaacgattactgtttaagatttccgggccaatggtggtggtcaaagtagggattattgtcgtgttcggttttgcgatgatcccgcactggaatttcgccaatataaccgccttcccgcaagcctccgtctttttccgcgatgtcttgcttaccattccattttgcttcttttctgcagtatttattcaggtacttaacccaatgaatattgcctatcgtaaacgggaagcggataaagtactggcaacccggctcgcgctgcgtacccaccgaattagttatatcacgctcatcgcggtgatcctgttttttgcctttagctttaccttcagtattagccacgaagaagccgtttctgcctttgaacaaaatatcagtgcactggcgctggccgcgcaggtgatccctgggcatatcattcatatcacctctacggtgcttaatatctttgccgtactgaccgcattctttggcatttatctcggtttccacgaggccattaaaggcattattctcaatctgttaagccgaattattgataccaagaaaattaacagtcgcgtgctgactctggcgatctgcgcttttatcgtcattacgttgacgatttgggttagctttcgtgtaagcgtgctggtgttctttcagttgggaagcccgttatatggtattgtgagctgcctcattccgtttttcctgatctataaagtcgcacaactggaaaaacttcgcggatttaaagcctggctgattctgctgtacggcattttgctatgcttgagcccactgttgaagctgattgagtaaaccggagcgcatggccccggttttgtgagttaacgctgcggattttcatcctgatcaacagcaaaacaagctaccagttgaccgccgtagtcttttagctgcggctgcaactgggtgcaggggccgaagcgccgacgacagcgggcgttgaaggcgcaacccggcggtggattcagtgggcttggtagttcaccgctgagcttgatgcgctcgcggcgatcgtccgggttcaggcgcggcgtcgcggaaagtagcgcctgagtgtacggatggcgcgggttattgaagatttggtctttcgttcccttctccacgcagcggcccaggtacatcaccatcacttcatcagcaatgtgctccaccacgctcaggtcgtgggagataaagacataagacagccccaactcctgctgcaaatccatcatcagattcagcacctgcgcgcgcacactaacatccagcgcggaaaccggttcatcggcaatcaccacatccgggtcgagcatcagaccacgggcgatggcgatacgctgacgctgaccgccggagaacatatgcggatagcggtcatagtgctcggttttcaggccgactttcgccatcatgctcagggctttttcccgacgctgttctttgcttaagctggtgttgatcagcagcggctcttcaagaatttgcccgacttttttacgcggattcaggctaccgtaagggttctggaagacgatctggattttctgccgacgcagcttctgcgcctgcggatcgtgcttaagcagatcctgcccctggtaatacagctcgccaccggtgggcatttcaatcatcgtcagcaaccgaccgagggtgcttttaccgcagccagattcgcccactactgccagcgttttgccacgttcaaggttaaagctaacgccatccagcgctttaaccagacgttccggcgcgaacatgcctttcttcaccggataatgttttttcaggtcgatagcctgcaacagcggttgttgcagggtggcctcttgcgtactcatagtgtcggcctcccggcatcatcaagtgggtaatggcatttggactgacgcccgtcagcgagcatattcagcgccggttcttcagcgcgacatctgtcagtggcataggggcagcgcgggttaagcaggcagccgttcgggcggtcgtacttgccgggaacgacacctggcaagctcgccagacgttctttgtcctgagcaaattctggcagcgcacgcagcaatgcctgagtatacgggtgacgcggcgcatggaagatggcgtgcgcatcaccggtttccaccacctggcctgcatacatcacgatgattttatgtgccgcttccgccaccagcgccaggtcatgggtaattaacaccagcgccatgttctctttctgctgtagctccagcagtagttcgatgatttgcgcctgaatggtcacgtccagcgcggtggtcggttcatcggcaatcagcagttttggccgacaggcaatcgccatggcgatcatcacgcgctggctcatgccgccggaaagctgatgcgggtaaacatccagacggcttgccggatcgggaataccgacctgattcagcaggtcaatcgctcgctgacggcgggtacttttgttgccgccctgatgcaccttaatcgcttccataatctggaaacccacggtgtagcacgggttaaggctggtcatcgggtcctggaagatcatcgccacttcggcacccaccaggttgcggcgctctttttcactgatacgctgcaaatcctggccgttaaactccagtttttctgccattacgcggcccggataatcaatcagccccataatcgccagactactgacgctcttaccggagccggactcacccacaatcccgaccacttcgccctgttttacgctgtagctgatgcggtctacggcgcggaacggcgcgctttcgtcgccgaaatgcacgcttaatttatctacatttaataacgccatctcgaacctcttactgcttcagtttgggatcgagcgcgtcacgcagaccgtcacccatcaggttaaatgccagcaccgtcagcaggatcgccagacccgggaaggtcacgacccaccaggcgctttgcgcgaactgcaacacgtcggagagcatggtgccccactcaggcgttggcggctgtgcccccatgccgaggaaaccaagagcagccatatcgagaatggcgttagagaaaccgaggctcgcctgaacaatcagcggcgcaaggcagttcgggaagatgttaataaacatctgacgcatcgccccggcacccgccacgcgagacgcggtgacgtaatcgcggttaacttccaccagcacggcggcgcgggttaagcgcacatagtgcggcaaggcaacgaaggtcagtgccagcgcggcgttaccaatgctcgggccgaaaattgccaccagcaccagcgccagcagcagacttggcagcgccagcatgatatcgaccacgcgcataatgatgttatcgaccaggccgccaaagtaaccggcgatcaggccgagaataacgcccataatcaggcttaacacaattaccagacagccaaccagcaggctcaggcgcgcaccgtacatcaggcggctcagcacatcacggcctacgtcatcggtgcccagcaagtgcgccatgctgccgccttcctgccaggctggcggggcgagcagtgcatcgcggaactgttccgccgggttatagggtgcaatccagttggcaaagatcgcgatgaacagcacgatgacgacgtaaaccagcccgacgaccgcgcctttgttgcgtttaaaatagtgccagaactcctgtaacggggtcatcggcaccggtgcgctaatcactttattttcagtaacctgactcatgatgtccccttacttcttatgacgaatacgcgggttcaccacgccgtacagcagatcgaccagcaagttgacgaggataatcatcgtcgccaccagcaatacgccgccctgcactaccggatagtcgcggcgttgcagtgcgtcaatcaaccagcgtcccagaccgggccagctgaagatggtttcggtcagaatcgcccccgccagcaatgttcccacctgcaggccgataacggtcaccaccggcagcatcgcgttacgcagcgcatggacgataatcacccgcatgcgggttagccctttggcgcgcgcggtgcggatgtaatcctcgcccagcacttccagcatgctggagcgtgtcatacgcacaatgaccgccagcggaatagtacccagcacaatggcaggcaagatcatatgggcgacggcatcgataaagttgccgtcttcaccccagatggcggtgtcgattagcataaaaccggttaacggattggagtcatcgaggaacaccatatcgctcacgcgaccggagacgggcgtcaggttccagtgcacgctaaccagcatgatcagcatcatgccccaccagaagataggcatactataacctgtcagcgccaggccaaccgctgtgtgatcgaaaatggaaccgcgtttaaccgcagccagcacgccgaccggaataccgactgccgtagcaaaaatcatcgcgcagacgccaagttccagcgtggcctggaagcgcggcacgaactcttcccaaaccgggatgcggcttttcatactaatgcctagatcgccatgcataacgccccaaatgtaatggagatactgctgccacatcggtttatctaagccgagttcagccagcagctgcgcgtgacgctctggggagatcccacgttcgcccgccatgatcatcaccggatcgcccgggatcatgtggacaaaggcaaatgtgagaagggtaataccgataaacgtggggatgacgagtcccaaacgtcggagaataaactgcaacataacccggattctctatagtgacccgcagcctggaactgcgtgtctgtattgctcacaaatcaattcccgcccttatcggacagggaatgaagtattgctgccggatggcgctgcacgcagaggcacagcgccaccgggtatacagattgttgacaaagtgcgctttgtttatgccggatgcggcgttaacgccttatccggcctacaaaatcgtgcaaattcaatacattgcagaattttcgtaggcctgataagcggagcgcatcaggcatttttgcctttgccatcagtcttgtatggcttttaattattcgatagagacgttttcgaagtgatgtttgcctaatggatcaaccacatagcctttaacttctttacgtaccggttcaaacacggtggagtgagcgatgatcagtgccggagcctgatcgtgcatcaccacctgcgcttgtttgtacagttcaacgcgtttattgtggtcgtcggtagcacgcgccggttgaatcagatcttcaaacggtttgtagcaccatttactgtagttggagccttgttcagaggcggcgcagctgaacaggatggcgaagaagttatccggatccccgttatcgccagtccagcccatcattaccgtctggtgctcgccatctttcgcacgcttgaggtactcaccccattcgtaggtgacaattttggcctgcacgccgactttcgcccagtctgcctgaatcatctccgccatgcggcgagcgttcgggttatacggacgttgtaccggcatcgcccacaggtcgatggagaaacctttttccagacccgcttctttcagcaaggctttcgctttttcaggatcgtaggtgtagtcctgaacgtcgtcgttatagccccacatggttggcgggatcaggtttttcgcacttacgcccgcgccctgataaaccgctttgatgatcgcgtctttgttcaccgcgtaggtcagagcctggcgaactttcacgtcatcgagtggttttttctgcacgttatagctgagataaccgacgttcagccccggcatttccatcagattgatggatttatcctgcttcatgcgagcgatatctgccgggttcgggtacggcatcacctggcattcattcttctgcaatttcgcgtaacgcacggaagcgtcaggggtaatagagaaaaccagcgtatcgatctgcggtttggtgccccagtagccatcaaacgctttgtagcggatacgggaatctttttgatactgctgtaactggaacggaccggttccgattgggttgaggtccagtttttccggtgtaccggctttcatcatcgcatcagcatattctttactcagaatagaggcgaagtccattgccaggtcagcgaggaacggcgcttccgggcgagtcagcacaaactgaacggtgttgtcgtccacctttttcacttcactgatcagctctggcaagcccatgccttcgaagtattcgtagctgccgccagaaactttatggtacgggttttgcgcgtttttctgacgatcgaagctgaacaccacatcatcggcgttcagttcacgcgtcggtttgaattctttattgtcgtgccacttcacacctttacgcagatggaaggtataggttttaccgtcttcgctgacttcccacttttcagcgaggcccgggatcacttcggtggtgccgattttaaattcaaccagacggttataaagcgggacggaagaggcgtcataggtggtgccggaggtaaacagctgcgggttaaacccttccggagatccttcactgcaataaaccagagttttagcctgaacacttgctgcgacggtcatagccaccaggctgagaccaagcttcagcatcccactctttttcaaggaaatacgcattattctgctccaattgtgatgtttgttgttttaaccctttgcagtgggttgtcgctgcctgaccttttttgttttttgcccggtcgggtcaacgttatgaggtggggatgccgtactaattaacatcagtgtaacagtgcggatcctccataaaatgcccctcgtgacctacaatctgtcaacagaatgtgaaaacgtcaatacagccaaccgggatttacaccaacggtgagaatccacacacaaagattaaaaaaacttcaaacagctatttgcagcagagaaatttgtgctactccaacatgaccagaacaatcagcttaatatttagcaacatttggtgattaagttttatgcatttaatgaaaaaaatctgaggaaaaggtggatatctgagcgattaataccatgaacgctaaaacgcacagcggaaaatgccagggccagccataagtaacgcaaaaaaagatttaagcaaatataaaaaaagacaatggtttctgtcacaaatccgttaatggatagtgagatatggggcgcaaatttggcagggaaatgtgtgtcgtgtaggtcgaataaggcggtcgcgccgcatccgacaatggccggcacatttgcctgatgcgacgctgacgcgtcttatcaggcctacgtcgagtcgaacctccctgcccccggaggttctcatcctcatgagctgcagatgcaaaaaagcctgctcgttgagcaggcttttcgaatttggtcggtgatagaggattactcgccacttcgtggctcgccctgcgggccgttgctggcgcaacgttctctcgcttcgctcgagtcgaacctccctgcccccggaggttctcatcctcatgagctgcagatgcaaaaaagcctgctcgttgagcaggcttttcgaatttggtcggtgatagaggattcgaacctccgaccccttcgtcccgaacgaagtgcgctaccaggctgcgccaatcaccgaatgcggggcgcatcttactgcgcagatacgccctcgtcaatcccttaatagcaaaatgccttttgatcggcgagaaagtcagcaggccgcttagttagccgctgcctcttttgcctgcgggatgtgacaccagttgttgttttcgttaattccaccatccggactagtatagccaagacaacccatgatggtatcgtacagctctacgtgacggcgtggcactttcatgtcggcttcttttttcagctgcgcaaacgcctgcgcattggccggattttccagatatttatcactcatccagaccatcatcggtacgcggaactgctccggcggtgccagttcacgcggcgtgccgtgcaggtgctcgcgttcattaatactctcaccgtggtcagctgcgtagaacacaatcgctttcttatcgcgaacctgatcaatcacgctggagataaagtgatccacataggtcacgctgttgtcataggagttgatcatctgcgctttggtacagccgctatcaacaccaatacattccggcttccactgcgcgaagctacgcggataacgctgggtgtagttaaaatggctacctttggtatgcagaatgatcagatgcttaccatccgggttgcgccctaggctttgctgcatttcgtctaccagcaacatatcatctaccggcttgccacgattacgtggctccgcaccaatctgctcacgataagcaatgttgtccgccatcgtgttgctgtagaaccacatttcgctctgcatagcgtagaggtcagaactgaatcctaactgcttcagaaccgcgaaaatgttctgttcttttaatgtgcgctgcggattatcttccgcgcccccctgacgtacaaacatgcaacgcagactgagtttggttgcggtatcacaggagtaaccacggaacgccgccagatttttctcctgggccagtttcggcgtggtattacgctcatagccgaaaatacccatatggtcccaacgcgtggtttcaccgatgataaacacgacataagtgtcatcaacgttttgcggtgcctgataagtgaatttcttcgccggattaagcaaactattattatcggaagattcatcgacccgcgcccaggcatacagccccaacgcagaaagccagttacttggcagataagagttcgctacgacaccgccataactcggcaaatcaacgccggtcgccctctccactttcttctgctggatatccagcaaacgaatcggtgcccaaaccataatacccgccagtacgacgaccgccaggctgcgaatacgctgccctggggttcgcagttgtcggagcaaggtgtagcgacagcggttattccagataaggataagaggcaatgcactaacggcgattaaccagagaataaagttcagaccaacaacttctttactcaggtcgatatcggtggtcatgacggaagcgatgatgccataaccaatgaccacattaaggaaggtcatgtaatagctggcacctgcggaaaagagcaccaccaggcttgccagaatacgccagctgcggcggccaaacaggctaagaagacgtagtaaaaagaaggtcaccagtacggtggcggccagttcaacaacagcagaaatgcctttccagacggtaaaatcgtgcgcatagctgccgaagcggcggtaaaaaaccgcgccattcataaaaaggccaatatagattgcaagcaaaaagctcagcttctgctgtgtaatgcttttgatgtatctcatgcaaacaaaccctggacaaacaggtgataacaccctgcttagtggcttttcaggcccggcagggaaaaagtgcggaggtagtcagataagtaaaatctacacgcgcgaataagtagaccacagcaaagggaaaaagtgtggggaaagagtgtgcatgaagcacaaatttacaaaaatgcaagtttgaaaagagactttagcgttacaaaaagcagtaaaaagggccagttaattggcccaaattttacgagtcattgtttatacatttcgttgatgcgtttgatgcacacggaagctgaagcccagtagctcgcggctgagcattaaagggagccatgcgcctcacgcaacattttctgctctggctgacgaatcgtcgtagaaagcgccaaactcagaatcagcagggcgaaaatcacgtagaaggtcacatagaagccgccaaacagactggcgataatgctaccacaaatgctaccgataccgaaaccgagataaatcacaccgtagtttttcgccaggttattgaggccaaagaactcactgaccagactcggaaagacggtaatagtgccgccaaagttaaatgccacgcaggcaatcgctgcaaagaacgtcactgcattcaatggtgcaaacagcagggccgccatacccaccaggcttatcacctgaccaatggtaataacacggatacgggcgattttgtcagacagaatacccagcaccagacgaccactaaggttggcgatggaaataacagtgactgcattggctgcggaaaccacatcaaggtgtgccagactttgggcgatatctttcgctaccccaatcacgtacaggccgctcatgcaggcggtcaggaacattaccgctaacatccagtactgcggtttacgcatgctctctgccagcgtgtaatctttctccaccacaccattgctggttttcacttcctgttttggtgcgtctttcattaacgttgcgccgaaaacaatcatcaacagcgcaatcgctccccaaatcacaaaggttttttccagaccgaccgtttccagcagctgcgtgtcgataaatttgaaacccaggctacccagaccataagaaccgatagcgaacgcggagatcagacctttacgctccgggaaccacttcacacagttagagagcgtcagcagataacccgcgccatctgccagtcccaccagcacaccggcgcttaaccacagcatcatcaggttgtcagaatgcgctgtcaggaagaagcctaatcccagcaaaatgccggaagccatggtgacgcgtttaacgccaaaacgttcctgtaatttgcccgcaacagaagagctaattgccagccccagacttaacaagccgaaagagaaagcgacctggcttaccggcgcatccagcttggcggaaagcgcgccattaaacaggctccaggtataaacgctccccagcgcaaactgggtaatgatagtaccgatgagtgtcagccagcgggtacgctgataattactaggtgtcatggcagtattcctgcagtaataaaaaggaaaaatctctgccgacaaccataacgaagtgcactttatgcctggggaaaaacggcatgaaatgccatcagaacggaatgaaatgccttagttcaggaatgaatgacgcgacaattattcaccaaatttattatttggtaagttagcacccactatcgccacaactattgttatttaatggtttcaattgtgactgttacgttaaaatctggcgctaacccccatcgtatacagatagtcgctattattagtggtattttctgcctgagttagcgcggcataggcggcaatattttgattgagcaacatatcagcgcctacggtgacatccagccagttgccgttctggtttgtcgccgtcatccggctcaggccactttgcgccttccagatattctcgccaaattgctggttatagctgatttgcgcccagggtcggagatcgccaagccgggagtcaacacgccagcctaaggtactcacgctggcatgccataacggatcggtcagcgtggtagtactgtcgccaaactcgttatacatgctggtggttgtgccatcgtaatgtaatgccgcgaccgggccggttgtaacctgttcatataaaggaaaattccagcccatactcatactgctggtcacatccacaggggtttcttccgccagattgacttccagtcccagcgccctttggctactttgaatacgttggctcaaaatatcgttgtaatcaggttgatgatcactatcccaggtgtaacgctctgtggaaagtccgggttgcgtatcaacgatatattcttgttgccaggcgtaagctgtgttgagaaaaaaggcactgattaccacgctcgccagcaggcttagctgccagcgaccaccgcttttttttatgatcattaacacgactccagggaagagccgaattcggcaatattattgtcattgtatgaaggatatcgggcatagtagccctgtattaaatattgactttttcaccgatgcgtcaagaaaagcggctgaaatttttacgatcgggtacatagcgagggaaagtatggaacgttgcggctgggtgagtcaggacccgctttatattgcctaccatgataatgagtggggcgtgcctgaaactgacagtaaaaaactgttcgaaatgatctgccttgaagggcagcaggctggattaagctggatcaccgtcctcaaaaaacgcgaaaactatcgcgcctgctttcatcagttcgatccggtgaaggtcgcagcaatgcaggaagaggatgtcgaaagactggtacaggacgccgggattatccgccatcgagggaaaattcaggcaattattggtaatgcgcgggcgtacctgcaaatggaacagaacggcgaaccgtttgtcgactttgtctggagctttgtaaatcatcagccacaggtgacacaagccacaacgttgagcgaaattcccacatctacgtccgcctccgacgccctatctaaggcactgaaaaaacgtggttttaagtttgtcggcaccacaatctgttactcctttatgcaggcatgtgggctggtgaatgatcatgtggttggctgctgttgctatccgggaaataaaccatgattcgggaagcgcaacgtagtgaactccccgcgatcctcgaactgtggctggaaagtacaacctgggggcatccctttataaaagcgaattactggcgtgactgcattccgctggtgcgggatgcctatcttgccaacgcgcaaaactgggtctgggaagaagacggtaagcttctcggttttgtcagcattatggaaggccgatttctggcagcgatgtttgtcgcaccgaaggccgtcaggcgcggtattggtaaggcgctgatgcagtatgtgcagcagcgccatccccacctgatgctggaggtttatcaaaaaaatcaaccggcgataaatttttaccaggcacagggttttcacattgtcgattgcgcatggcaggatgaaacccaactacccacatggattatgagctggccggtggttcaaacgctgtaattaactgctggccggtggttcaaacgctgtaagtgtcagttccggaccgttgtatttttccagccatgccagcgccgtattacccgcacagccattccccagccggctgctggggagatctttggtcagcacgttcactgcgccgtttttacaaataccgtcagcggttaaatccagatccggccatgccccttcgtgaatgcaaatcacgccaggtttaattccctcgctaatgaccgctccggcaagaatttgcccgcgtgcgttccacaaccgaacagtatcgccatcttgtatgccgcgctcctgggcatcgtcaggatgaatggtgacaggctcacgatttgccaccgcgtacaattcgcgcagagaactgtaattcagctggctgtgcaggcggtgcgccggatgggcagaaagtacctgcaactgttctggttcggcattgccctgccattcgtccggctccagccacattggatgcccagggcaatccgggtaaccgtaatcggcaatacgctgactgaagatttcaatcttgccgctggcggtttttaacggatgcgccagcggatcgcggcaaaaatcagcgaagcgaataaaccgctcgctgtccgggttttccggcatctcaattaactggttggcttgccagaactcagcaaatggcggcaattcaacctgctggcttgccccgcgctgtcgggcaacgttataaaacgtttccagccattgcagctcactttttccttccgtaaaacgtgcataaccgcccttctcccagcgttcacttaactcggcaaaaacatcaaaatcattacgcgcttcatagcgtggcggcaccacttgcttcatcggcaccagatgctgattactgtaatcaccggtcatggtgagatcattacgctcaaaagaggtagtcgcaggcagaacgatatccgcgtgttttgccgccgccgtccagaagcattcagagatcaccaccagctccggtttttgccaggcacggatcaggcgattggtatcctgatgatgagtaaagttggcaccgcccgcccaccagataaaacgaatatccgggaaatgtcggttcataccgttgtgttgatatgcgccaccagggttttccagtgcttcaacaatgcgggcaacagggattttatccaccgcatcgcagccacccggcaagctgccctgcatggaagagagcaccgcagaacgccgcgtggggttaccaccattggcaaaatggtaagaaagaccaaaaccgccgccgggtgtgccgatttgccccaacattgctgccagcgtgacgatcatccagtgtttttgctcaccaaactgttggcgctgcattccccagcctgccatcagcatggtggtattttggtggaaaatagccgccagctcgcggattttcgctgcgccaacaccacaaatctctgctgcccattcggcggttttcgctattccgtcactctcgcccagcaaataagaggcgaagacggcataacctgtggtgcaacgcgccagaaacgcttcgtcgtgccaaccattttccaccagcgtatgggcgatccccagcatcagcgcaacatcggtgcccatgtgcggtgccacccactccattttatcgccaaagaaatcgacggtttcgcttcgcattggatcaatgcagatcagctttttcccgctgtcacgcagtgcagaaaagtaagaaagcccctgctcatcggatgcattccacgcaattttcagcgtattgagtgggttagcactccacagcaccacgacatcgctatgttccagcaccagcggccaactggtctgctgttgataaacttcactaccacccacgacatacggcatgatcgcctgtgccgcgccggtgctataatcccccagatgcccggtataaccgcctgccagcgccatatagcgttgtaataatgtgctggccttatgcagcacgccgttactacgccagccgtaggaaccagcaaaaatgcttgccggaccataagcctcacgaatgcgtttatgttgttggtgaataagatccagcgcctcatcccaactcacgcgaacaaattcatcctgcccacgaatgccttgcgggttttccggactcgcaagaaagccttttcgcaccattggaaatcgtacccgcgtattgctgtgaacctggtcgcgaaccgcgctctgcaaggagttttccattcctgtggctaacgcgccacggctgctaaacacggtttcgccgtcggtttcaaccagcatgggcccccaatgggcggcagtcagaacggaatatcgtgaggatgagttggccaaaccgaagactcctgaaaggttagatgtattgagcagttaaatattacttacaaatttccgagtattcccaggaataatcttcatgttcacgcggcataatctcccgccacggaacccgtggcaaagaataaaaaggttattaaggattaacaatgaagaaacgtgtttatcttattgccgccgtagtgagtggcgctctggcggtatctggctgcacaactaacccttacaccggcgaacgcgaagcaggtaaatctgctatcggcgcaggtctgggctctctcgtgggcgcgggtattggtgcgctctcttctagcaagaaagatcgcggtaaaggcgcgctgattggcgcagcagcaggcgcagctctgggcggcggcgttggttattacatggatgtgcaggaagcgaagctgcgcgacaaaatgcgcggcactggtgttagcgtaacccgcagcggggataacattatcctcaatatgccgaacaatgtgaccttcgacagcagcagcgcgaccctgaaaccggcgggcgctaacaccctgaccggcgtggcaatggtactgaaagagtatccgaaaacggcggttaacgtgattggttataccgacagcacgggtggtcacgacctgaacatgcgtctctcccagcaacgtgcggattccgttgccagcgcgttgatcacccagggcgtggacgccagccgcatccgtactcagggccttggcccggctaacccaatcgccagcaacagcaccgcagaaggtaaggcgcaaaaccgccgtgtagaaattaccttaagcccgctgtaatccctttcatgccaggtgatgcagaaatcacctggcattcttcagttttccttcatcatatttcaggctaaggtgatcgccttatcagtgaatggagagaagcatgaagccgtccgttatcctctacaaagccttacctgatgatttactgcaacgcctgcaagagcatttcaccgttcaccaggtggcaaacctcagcccacaaaccgtcgaacaaaatgcagcaatttttgccgaagctgaaggtttactgggtagtaacgagaatgtaaatgccgcattgctggaaaaaatgccgaaactgcgtgccacaagtacgatctccgtcggctatgacaattttgatgtcgatgcgcttaccgcccgaaaaattctgctgatgcacacgccaaccgtattaacagaaaccgtcgccgatacgctgatggcgctggtgttgtctaccgctcgtcgggttgtggaggtagcagaacgggtaaaagcaggcgaatggaccgcgagcataggcccggactggtacggcactgacgttcaccataaaacactgggcattgtcgggatgggacggatcggcatggcgctggcacaacgtgcgcactttggcttcaacatgcccatcctctataacgcgcgccgccaccataaagaagcagaagaacgcttcaacgcccgctactgcgatttggatactctgttacaagagagtgatttcgtttgcctgatcctgccgttaactgatgagacgcatcatctgtttggcgcagaacaattcgccaaaatgaaatcctccgccattttcattaatgccggatgtggcccggtggttgacgaaaatgcactgatcgcagcattgcagaaaggcgaaattcacgctgccgggctggatgtcttcgaacaagagccactgtccgtagatagcccgttgctcagtatggccaacgtcgtcgcagtaccgcatattggatctgccacccatgagacgcgttatggcatggccgcctgtgccgtggataatttgattgatgcgttacaaggaaaggttgagaagaactgtgtgaatccgcacgtcgcggactaagccgcgactgcgtagagtaaagcccgataatcgctcgggcttttactctttattgggttgcagtaactgctgtagtccaggcctgattaaacgcctgatgctgtgccggtaatggcgcaatcagtttgttatattcacttgcctgctgactagtcgggaactggatgccatttgcgacaaagctcacctgagtaccttgctgagcaatgtagtctccaaccatcaccagttgttgcgtgaaagtttgtgccgccggaatcaacggttgcaatgcatcagctggcgtcgttaccactttggtgaatgcctgatcaaagaccggtttcaaatcatcgctctgttttagcgcagagtgcgcagcatcggcctgcaacttcgcattttgcagttgttgcgccagcacacccaggctaccgttcatttcacgcagcggaccgctttgcgtaacgtaatcctgcggtacgcgaattgcgttaacgctgtctacaaccgggcgcagaccggaatccatcgcctgattcacctgctgagaataaccatacagaatcgcgtaatcagagacaaaaggaccaaactgttttttctgatcggcagtcagggttggtagacgttcaccgctacgcatcactgtattctgcaggaagtcgataaacgctttacgctgatcgccttctttatcaaaacacccactcaggctaactaccattaataacgccgcaagaggcgcaaaccagcgagagcaggactttcctgtcgccattttcttactcctttcacccaaaaaaagcgcacaacgacacacgcgtgtctgacgtgacaaggatagtccaggacaggcttgcaggataccctttctacgtaatcttcctggtaaaatcatggagaaaatgaaacaaggttaatttgttgtttcattgttaaaaaatgatagtgccgttgccttttttgtagccagagatttacgccttcgcagaaggttagattttcgaaatctttacaaaacaggagtggtaagagatatatcggcatttatcagatcgttaggtggctataagtcacgctaaatgacaggctgaatcgaatcatagccagagcatgccctgacttcaccccgctgtgtctgcttttcccgactattcttaatgagcttcgatgcaattcacgatcccgcagtgtgatttgaggagttttcaatggaatataaagatccaatgcatgagctgttgagcagcctggaacagattgtttttaaagatgaaacgcagaaaattaccctgacgcacagaacaacgtcctgtaccgaaattgagcagttacgaaaagggacaggattaaaaatcgatgatttcgcccgggttttgggcgtaagtgtcgccatggtaaaggaatgggaatccagacgcgtgaagcctagtagtgccgaactaaaattgatgcgtttgattcaagccaacccggcattaagtaagcagttgatggaataaacttttatccactttattgctgtttacggtcctgatgacaggaccgttttccaaccgattaatcataaatatgaaaaataattgttgcatcacccgccaatgcgtggcttaatgcacatcaacggtttgacgtacagaccattaaagcagtgtagtaaggcaagtcccttcaagagttatcgttgatacccctcgtagtgcacattcctttaacgcttcaaaatctgtaaagcacgccatatcgccgaaaggcacacttaattattaaaggtaatacactatgtccggtaaaatgactggtatcgtaaaatggttcaacgctgacaaaggcttcggcttcatcactcctgacgatggctctaaagatgtgttcgtacacttctctgctatccagaacgatggttacaaatctctggacgaaggtcagaaagtgtccttcaccatcgaaagcggcgctaaaggcccggcagctggtaacgtaaccagcctgtaatctctgcttaaaagcacagaatctaagatccctgccatttggcggggatttttttatttgttttcaggaaataaataatcgatcgcgtaataaaatctattattatttttgtgaagaataaatttgggtgcaatgagaatgcgcaacgccgtaagtaaggcgggaataatttcccgccgaagactcttactctttcaatttgcaggctaaaaacgccgccagctcataactctcctgtttaatatgcaattcacacagtgaatctcttatcatccgggtgaaaaataaaagcgtgaaacaaatcactattaaagaaagtaatctatatttctgcgcattcccagcctcctgtgttgatttccaacgagtataactttgatttatagtcaggtggggcttttctctgtctgcctttcggtgaatacctgagacaaacagtctcaagcacccgtggctattctagcttaataagtttgtttcttctccttgatataatcctaaaaaaatctcataaaattaatatatgagataatctttattcagcagaagattattaaaggttgctgtattatttagcgataaaaaaagcctgccagatggcaggctatttaataacggcgttattattgcaacaggctaatatccgcaacgcgcaggaacagttcgcgcagtttctccagcatggtcagacggttgatacgcaattctttgtcatcaaccatgaccatcactttatcgaagaaagcatcaaccggttcacgcagctcagccagttcgaccagcgcatcctggtaacgaccttccgtaaagtacggctccagcttgtcacgtagcaccacaacctgcatcgccagtttaatttcttccggctctttcagggtagaggcattcacgcggtcgctcagcacttcgtcagatttcgccagaatgttagatacacgtttgttcgccgccgccagtgcagcagctgcatccagggtacggaaatggcttaccgctttcatacgggcatcgaaatcagccggacgagtcggacgacgcgccagtaccgcctggatggtgtcaacggtataaccttcgtcctgataccaggcgcggaagcgaccgagcataaagtcgataacatcatcaactacgttggcattagtcagcttatcgccatacagacgcaccgcttcttcggtcagcgtttgcagatcaaggttgaggttcttctcaacgataattcgcagcacgccaagcgcggcacgacgcagcgcaaacgggtctttgtcgcctttcggatgctgaccgataccgaagatacccgccagggtatccatcttgtcagcaatcgccagcgcacaagctactgggttggacggcaggtcatcaccagcaaaacgcggctgatactgctcattcagcgccaccgcgacatcttccgcttcgccatcgtgacgcgcatagtgcatccccataacgccctgggtgtcggtgaactcgaagaccatgttggtcatcaggtcgcacttagacagcagacccgcacgggtagcgtggttaacgtcagcgccaatctgttcagcaatccagccagccagcgcctggatgcggtcagttttgtcgcgcagcgtccccaactgttgctggaacaacacggtttgcaggcgcggcaggttatcttcaagacgttttttacggtcggtgttgaagaagaactcggcatccgccagacgcggacgaacgactttctcgttaccggagataatctgctgcggatctttgctttcgatgttggcaacgaagataaagttcggcagcagtttgccgtcgttcgcatacaccgggaagtatttctggtcacctttcatggtgtaaaccagcgcttcagccggcaccgcgaggaatttctcttcgaattttgcggtcagaacgaccggccactccaccaggctagccacttcttccagcaggctttcgcttaagtcagcgttaccgccaatcttacgcgctgcttcttcggcatcggctttaatcttcgccttacgttcttcgtaatcggcgatgactttcccacgctcacgcagaatttccggatactgatcggcgttatcgatggtgaattccggctcgcccataaagcggtggccgcgaatcacgcgatcggactgaatgcccagaatggttgccggaatgactttgtcgcccagcagcagggtcacggtgtgcaccggacgcacgaagtgcacgtcgcttgcgccccaacgcatcagtttcgggatcggcagtttcgccagagaagtcgcaaccatattcggcagcagtgcttcggtgctttcgcccttcacatgggcgcgatacagcagccattcgcctttatcggtagtcagacgctcagcctggtcaacggtaataccgcaaccacgcgcccaaccttctgccgctttgctcggtttgccttcagcgtcgaacgcctgggcaatcgccgggccgcgtttttcgatttcacgatccggttgcgcttccgccaggttagctactttcagcgccagacgacgcggagcagcaaaccattgaacggtgccgtgtgcgaggccagcgctatccagctccgcagtaaagttcgcagcaaaggactcagccaggctgcgcagtgcttttggtggcagctcttcagtgccgatttccaccagaaaagttttctcagacatagccgcctcttacttatctttgttgcacatcgggaagccgagggcttcacgggaagcgtagtatgcttctgccactgctttggtcagggtgcgaatgcgcagaatgtagcgctgacgctcggtgacggagatggctttacgcgcatccagcaggttgaagctgtgggcggctttcagaatacgctcgtaggctggcagcggcagcggattttccagcgccagcagctgctgcgcttctttctcgtactgctcgaagcaggtgaacaggaagtccacatccgcgtattcgaagttgtaagtggactgctccacttcgttctgatggaacacgtcgccgtaggtggttttacccagcgggccgtcgctccagaccaggtcgtaaacgctgtctacgccctgaatgtacatggccagacgttccagaccgtaggtgatctcgccggtaaccggtttacactccagaccaccaacctgctggaagtaagtgaactgcgtcacttccatgccgttcagccacacttcccagcccagtccccaggcacccagcgtcgggttttcccagttatcttccacgaaacggatgtcgtgaatagtcgggtccatgcccagctctttcagagaaccgaggtacagctcctgaatattgtccgggcttggcttaatgaccacctggaactgatagtagtgctgtaaacggttggggttttcgccgtagcgaccatcggtcgggcgacgagaaggctgaacataagcagccgccatcggttctggccccagctcgcgcagacaggtcattgggtgagaggttcccgcgccgacttccatgtccaatggttgaacaatggtgcagccctggcgagcccagtaatcctgtaaggtcaggaacaagccctggaaggtcctggtatcaaacttttgcatattatttcgtgctggatacgtgtggatttaaaggaagggatcagtatacccgctggatggaagatatacagtacgaaacgggaaaaagcagggcttaacgcatggaaagatgcaaaaaatggccatccgcgtcaaaagaacagacaaactgctctttacggaaggtataaccgcgcatttcatagcttccctggaactgttcgaaggcggtgacgtcgattttttgctcgccggtgttataacgttttgccgcctgatccttgcataacgcttccatattcaagctacgcagaggatcaacctttacccgttgtgctttctgcacgggactcggtatagaacaacccactagcaccataagcgccattgccggaaagaaagcgttcatcatcattaaattaccgtctggtttgcaggtgagtcttattatttatatcggtatagtggctgatatcttacgaatttccttaagcctctataagctgtagtgataaaactcagattattccagtgcgccaaccaaatgatttatcggtcagactttttttaaccagatacagagacacagatgcagcccaaaatttactggattgataacctgcgagggatagcgtgtttaatggtggtgatgattcacaccactacctggtatgtgaccaatgctcatagtgttagccccgtcacatgggatatcgccaatgttctgaattctgcctctcgtgtcagcgtgccgctatttttcatgatttccggctatctcttttttggcgaacgcagcgcccagccgcgccatttcttgcgtatcggcttatgtctgattttttatagcgcaatcgcactgctctacattgcgctgtttacctccatcaatatggagttagcgctgaaaaacctgctgcaaaagccagtgttttaccacttgtggtttttcttcgcgattgcggtgatttatctggttagtccgctgattcaggtgaagaacgtcggcggaaaaatgttgctggtgctaatggcggtgattggcattatcgctaacccaaacacagtgccgcagaaaattgacggttttgaatggctgccaattaacttatatatcaatggcgatactttttactacattctgtatggcatgttgggccgcgctatagggatgatggacacacagcataaagcactgagctgggtgagcgccgcgctgtttgcgacgggggtttttattatctctcgcgggacattatatgaattgcagtggcgcggaaattttgccgatacctggtatctttactgtgggccgatggtttttatctgcgcaatcgcgctattgactctggttaaaaacacgctggatacgcgtaccattcgcggacttggcttaatctcccgccatagtttgggtatatacggattccacgccttgattatccatgcgctgcgcacccggggaattgagcttaaaaattggccaatactggatattatttggatcttttgcgcgacgttggcagcgagtttgttactttctatgctggtacaacgaatcgacagaaacagattagtgagttaagtaaaagcccggtcacattggactgaccgggcttacgtgagttattcgctgtattcttcctgggtaacctgtgtttcttttggtgggtttattccggcatcacgaatatttttctgcaccgctactgcaccaaacaagcttaagaagaaagccagtccataaaaacctttttcgctgagtaataatgtcgcattccacagacctaccatcagtaatgcaacagagataataaagacagtcaggcaggtcatataataaatggaagtggtcggtatgccttcatacttgtcccgaacggtcttttgataagacgccgcagaaaacagtcctaataccagtacggcaaaataatatcctttttcatttaactgcatctctgcattccatagccctaacagataggtaacgataccaccaacgagagctatccaactcacaatactaaaggccggactataggtacttattttgttgtccatcacagtattcctttcattcctgaatatgtaagagctttatgttgctcatgcgctgcgaaacaaacgcatttgaccaaacaagcagacaaaaaaggcgatgggatagatcaccatttcataagtattgataggtgcgtttaaaacaccgataaacaagagaccgatagtgattaacgcaactaactggcagatatgggtaaaaaaatcatccagttgcccgagtttttctgcgcgaagatatgcatagttgccaaaagttgctgtcattaacacgccaagaaaatagccttttccacttaacaatgggcaactgatccatagcccaaccagataaaccagcgccccgacaacaaataatagtttcgccacagtcttactggttttcataacgatctccatatctaccagcgatacattacgagtaaccaacgaaagacaaaactgaaaaatgccattaacaaatgattttcagaataaattcatactaaatattaattaattactgagatatatagatgtgaattatcccccacccggtcaggcaggggataacgtttacgccattaatggcagaagttgctgatagaggcgacggaacgtttctcgtcgtggctgataagcggcataacgctgcgcatctggtagatggctctgttctaacggtagttgcggcaacaattcaatgaggcttttctctggattcgccgcgatctgcgccagccttgctgcgcccagtgctggccccacatccccccccgtacggtaatcgagctgctgaccgctgatatccgccagcatctgacgccagtactcactacgcgccccgcccccaatcaacgtaacactttgcggtttaataccgcaggcatgcacgacatccatgccatctgccagcgcataacccacgccttccagcactgctcgcgccagttcattggggccatgttgatgagtcaaaccaaagaaaacccccttcgcctggggattattgtgtggcgtacgctcgccggaaagataaggcagaaaccaaactggctcggcactttcatcagcctgttgagctgcagcgattaaagctgggacattgctcaggccggttaatttcgcggcccaatccagacagctcgctgcactcagcatcacagacattaaatgccaacgttgcggtagcgcatggcaaaagctatgtacggcgctttctggcttgcttaagaacccttcgctgacagcaaaatagaccccgctcgtccccaggcttaacattgcctgattagcatcaaccattcccacaccaactgcaccagctgcattgtcgccaccgcctgcgacaactggcaccgtcgccataccccacgctttcgcaacttcaggtaacaaagcaccagtaatttcgctgccttcgtataatgcgggcatctggtcacgagataagtcgcaagcctgcagcatgacgtcactccagtcacgctttgcgacatccagccacatggtgccagctgcgtcagacatatcgctggcaaactcccccgtcatacgcagacgcaagtaatctttcggtaataatactttgtcgatttgacggaatatctccggctcatgccgctgaacccatagcaatttaggcgcagtaaatccgggcatcatcaggttgccggtaatcacccggctttgcggaactcgcgcttccagcaaagtgcactcttgcgcacagcgcccgtcgttccacaaaatggcagggcgtaacacccgttgctgagcatccagcaaggttgctccgtgcatctggccggcaatacccaatgctttaacgtcctgcagagaatgctgatcgcccagagctttcattgcgcgatcagttgcctgccaccactgttccgggtcttgttcgctccagagtggatgcgggcggctaacggtcagcttttccgtttgcgcagcaaccacctcaccctgctcgttgagcaaaataacttttacgccgctggtgccaagatctatcccgatatacatatcgatcgttccttaaaaaaatgcccggtatcgctaccgataaccgggccaacggactgcacagttagccgttatttgtcgaacagataatggtttaccagattttccagttgttcctggcgaccactctgatgcaccggagacaaatgatgttcctgagcatatttggctaaatctgccagactcatttggcctttcaggatttgctggcccaattcgctattccagccggaataacgctgcgcgatgcgtttatccagctcgccatcttcaatcatgcgcgctgcaattttcagcgccagtgccatcgtatccatcgcgccgatatgaccgtaaaacagatcatatttatcagtactttgacgacgtactttggcatcgaagttcagaccaccggtggtgaaaccgcctgctttgagaatttcatacatcaccagcgcattctcttccacactgttcgggaactggtcggtgtcccagcccagttgcgcatcgccacggttggcgtcgacagaaccgaacaggccaagcgcaatggcggtggctatttcatgatggaaagagtgacctgccagcgtcgcgtggttagcttcaatgttcagtttaatctctttttccagaccaaactgtttcaggaagccatagaccgtcgcggcatcgtaatcatattgatgtttggtcggttcttgcggtttcggttcgataagcaacgtgccctggaaaccgattttatgtttatgctcaaccaccatctgcataaagcggcccagttgttcacgctcctgacgcaagtcggtatttaacagcgtttcgtaaccttcacgaccgccccacaggacatagttttcaccgcccaatttatgggttgcttccatcgctgtaacaacttgcgttgccgcccagctgaagacttcaggatctgggttcgtcgccgcacccgcgccgtagcgagggtttgtaaagcagttggccgttccccacagcagcttcacgccgctctcttcttgcttgcctgccaggacatcaaccatttgcgcaaaattattgatgtactcttttaagctcgcgccctcaggggaaacatccacatcgtggaagcaataaaatggcacatgtaacttgtggaaaaactcaaatgcgacatctgctttacgcttcgccaacgccagtgcctcaccaggctgctgccacggacgattaaacgcccccacaccaaacatatccgccccgttccagcagaaggtgtgccagtagcaggcggcaaaacgcaagtgctcttccatacgcttacccaacaccagttcgtcgggattgtagtgacggaatgctaacgggttactggatttactgccttcataacgaacgcgatcgagctggtcaaaataggcttgcatattgaactccataatcaggtaatgccgcgggtgatggatgatgtcgtaatattgggcactccctttcagttgctcaattatgttatttcacactgctattgagataattcacaagtgtgcgctcgctcgcaaaataaaatggaatgatgaaactgggtaattcctcgaagagaaaaatgcaataagtacaattgcgcaacaaaagtaagatctcggtcataaatcaagaaataaaccaaaaatcgtaatcgaaagataaaaatctgtaattgttttcccctgtttagttgctaaaaattggttacgtttatcgcggtgattgttacttattaaaactgtcctctaactacagaaggccctacaccatgaaaataaagaacattctactcaccctttgcaccagtctcctgcttaccaacgttgctgcacacgccaaagaagtcaaaataggtatggcgattgatgatctccgtcttgaacgctggcaaaaagatcgagatatctttgtgaaaaaggcagaatctctcggcgcgaaagtatttgtacagtctgcaaatggcaatgaagaaacacaaatgagccagattgaaaacatgataaaccggggtgtcgatgttcttgtcattattccgtataacggtcaggtattaagtagcgttgtaaaagaagccaaacaagaaggcattaaagtattagcttacgaccgtatgattaacgatgcggatatcgatttttatatttctttcgataacgaaaaagtcggtgaactgcaggcaaaagccctggtcgatattgttccgcaaggtaattacttcctgatgggcggcagcccggtagataacaacgccaagctgttccgcgccggacaaatgaaagtgttaaaaccttacgttgattccggaaaaattaaagtcgttggtgaccaatgggttgatggctggttaccggaaaacgcattgaaaattatggaaaacgcgctaaccgccaataataacaaaattgatgctgtagttgccagtaacgatgccaccgcaggtggggcaattcaggcattaagcgcgcaaggtttaagtgggaaagtagcaatctccggccaggatgcggatctcgcaggtattaaacgtattgctgccggtacgcaaactatgacggtgtataaacctattacgttgttggcaaatactgccgcagaaattgccgttgagttgggcaatggtcaggaaccaaaagcagataccacactgaataatggcctgaaagatgtcccctcccgcctcctgacaccgatcgatgtgaataaaaacaacatcaaagatacggtaattaaagacggattccacaaagagagcgagctgtaagcgttacgccccagcgcggagcgggggcgtgatttctctccatgccgcgtgaatgaattggcttaggtggagtcgttatgccttatctacttgaaatgaagaacattaccaaaaccttcggcagtgtgaaggcgattgataacgtctgcttgcggttgaatgctggcgaaatcgtcagtctttgtggggaaaatgggtctggtaaaagtacgctgatgaaagtgctgtgtggtatttatccccatggctcctacgaaggcgaaattatttttgcgggagaagagattcaggcgagtcacatccgcgataccgaacgcaaaggtatcgccatcattcatcaggaattggccctggtgaaagaattgaccgtgctggaaaatatcttcctgggtaacgaaataacccacaatggcattatggattatgacctgatgacgctacgctgtcagaagctgctcgcacaggtcagtttatccattagtcctgatacccgcgttggcgatttagggcttgggcaacaacaactggttgaaattgccaaggcacttaataaacaggtgcgcttgttaattctcgatgaaccgacagccagtttaactgagcaggaaacgagcattttactggatattattcgcgatctacaacagcacggtatcgcctgtatttatattagccacaaactcaacgaagtcaaagcgatttccgatacgatttgcgttattcgcgacggacagcacattggtacgcgtgatgctgccggaatgagtgaagacgatattatcaccatgatggtcgggcgagagttaaccgcgctttaccctaatgaaccacataccaccggagatgaaatattacgtattgaacatctgacggcatggcatccggttaatcgtcatattaaacgagttaatgatgtcagcttttccctgaaacgtggcgaaatattgggtattgccggactcgttggtgccggacgtaccgagaccattcagtgcctgtttggtgtgtggcccggacaatgggaaggaaaaatttatattgatggcaaacaggtagatattcgtaactgtcagcaagccatcgcccaggggattgcgatggtccccgaagacagaaagcgcgacggcatcgttccggtaatggcggttggtaaaaatattaccctcgccgcactcaataaatttaccggtggcattagccagcttgatgacgcggcagagcaaaaatgtattctggaaagtatccagcaactcaaagttaaaacgagctcccccgaccttgctattggacgtttgagcggcggcaatcagcaaaaagcgatcctcgctcgctgtctgttacttaacccgcgcattctcattcttgatgaacccaccaggggtatcgatattggcgcgaaatacgagatctacaaattaattaaccaactcgtccagcagggtattgccgttattgtcatctcttccgaattacctgaagtgctcggccttagcgatcgtgtactggtgatgcatgaagggaaactaaaagccaacctgataaatcataacctgactcaggagcaggtgatggaagccgcattgaggagcgaacatcatgtcgaaaagcaatccgtctgaataacgcattgaggagcgaacatcatgagcaaaagcaatccgtctgaagtgaaattggccgtaccgacatccggtggcttctccgggctgaaaagtctgaatttgcaggtcttcgtgatgattgcagctatcatcgcaatcatgctgttctttacctggaccaccgatggtgcctacttaagcgcccgtaacgtctccaacctgttacgccagaccgcgattaccggcatcctcgcggtaggaatggtgttcgtcataatttctgctgaaatcgacctttccgtcggcagtatgatggggctgttaggtggcgtcgcggcgatttgtgacgtctggttaggctggcctttgccacttaccatcattgtgacgctggttctgggactgcttctcggtgcctggaacggatggtgggtcgcgtaccgtaaagtccctagttttattgtcaccctcgcgggcatgttggcatttcgcggcatactcattggcatcaccaacggcacgactgtatcccccaccagcgccgcgatgagtcaaattgggcaaagctatctccccgccagtaccggcttcatcattggcgcgcttggcttaatggcttttgttggttggcaatggcgcggaagaatgcgccgtcaggctttgggtttacagtctccggcctctaccgcagtagtcggtcgccaggctttaaccgctatcatcgtattaggcgcaatctggctgttgaatgattaccgtggcgttcccactcctgttctgctgctgacgttgctgttactcggcggaatgtttatggcaacgcggacggcatttggacgacgcatttatgccatcggcggcaatctggaagcagcacgtctctccgggattaacgttgaacgcaccaaacttgccgtgttcgcgattaacggattaatggtagccatcgccggattaatccttagttctcgacttggcgctggtagtccttctgcgggaaatatcgccgaactggacgcaattgcagcatgcgtgattggcggcaccagcctggctggcggtgtgggaagcgttgccggagcagtaatgggggcatttatcatggctagtctggataacggcatgagtatgatggatgtaccgaccttctggcagtatatcgttaaaggtgcgattctgttgctggcagtatggatggactccgcaaccaaacgccgttcttgattttgataaaaattttctcaaagccggttacgtattaccggttttgagtttttgcatgattcagcaggaaaagaaccatgtttactaaacgtcaccgcatcacattactgttcaatgccaataaagcctatgaccggcaggtagtagaaggcgtaggggaatatttacaggcgagtcaaagcgaatgggatattttcattgaagaagatttccgcgcccgcattgataaaatcaaggactggttaggagatggcgtcattgccgacttcgacgacaaacagatcgagcaagcgctggctgatgtcgacgtccccattgttggggttggcggcagctatcaccttgcagaaagttacccacccgttcattacattgccaccgataactatgcgctggttgaaagcgcatttttgcatttaaaagagaaaggcgttaaccgctttgctttttatggtcttccggaaagtagcggcaaacgttgggccactgagcgcgaatatgcatttcgtcagcttgtcgccgaagaaaagtatcgcggagtggtttatcaggggttagaaaccgcgccagagaactggcaacacgcgcaaaatcggctggcagactggctacaaacgctaccaccgcaaaccgggattattgccgttactgacgcccgagcgcggcatattctgcaagtatgtgaacatctacatattcccgtaccggaaaaattatgcgtgattggcatcgataacgaagaactgacccgctatctgagccgtgtcgccctttctagcgtcgctcagggcgcgcggcaaatgggctatcaggcggcaaaactgttgcatcgattattagataaagaagaaatgccgctacagcgaattttggtcccaccagttcgcgtcattgaacggcgcagtacagattatcgcagcctgaccgatcccgccgttattcaggccatgcattacattcgtaatcacgcctgtaaagggattaaagtggatcaggtactggatgcggtcgggatcagccgctccaatcttgagaagcgttttaaagaagaggtgggtgaaaccatccatgccatgattcatgccgagaagctggagaaagcgcgcagtctgctgattagtaccaccttgagcatcaatgagataagccaaatgtgcggttatccaagcctgcaatatttctactctgtttttaaaaaagcatatgacacgacgccaaaagagtatcgcgatgtaaatagcgaggtcatgttgtaacgatgatgagaattgtcggcgtcacatcaggtaacgctgcgtggttgtcggatgcggcgtgaacgccttatccgacctacccgccaggcatgataaaacgcaccaacaacgcttcaggctcgtagctcaactgcctgagacaaagtaaaaagccttatccgactgacaagtcggataaggctcaaggaaatgcaattacatatgcgccgcgattaaccgttggttatcctggtacattgcgaacaggtagttgttataactcttccctttggtgctgtagcccttcagcttgtgaatcatcgctgtggcagtcacttcctgatccgctttacgcagctgcgcacggcttttacggaagctagagtaagccgggtgcgtattcaggttagtgacataggcgctcacgctttctttgacagaactaaactgactgtaccctttcactttacctggcgcattggtacaacgtcctttcatgcatttcatgccgaacaggttgttgttgttgcgcgccagcttgctcgttccccaaccgctttctgctgcagccatcgtcgccaccatactggtggggataatgtctacgcgttcaagcaaggtattccacgggatttttcgcgtattaccggaccacttcaccttgtagcgtttggcgatgtctttcagacgcgcacgctcagcaggactccattggccctgatactgtttactaatgagccagttacgttccgcagtaatggccgcattttggctggtaatgtaaggcattacggtccggagaaacgcctttttccttggtgttccggaagggtattttcgcaaatcaggaagactactactctttgcactattgcgagaatactcttgtttactgcttacctgtttattactagctttagttaagtgggacttttgactcgctgttgttgtgtgcgtcttcgctaacacctcactgctaaacaccagagtgagtaacataagaatcatcgccccatatcgtcgtatgggagtcaaaatcatcaggtctcctggtcggatttaatcattccaacaccttatatttttcacaaatttgagagttgaatctcaaatcatatcaaaaatagctgtcaagagcaccccaaggaatagtccaaatctgaaactatgtcacgtgttaacgattcagattggcgctaaatcgcagaaaatgtgggggttatcgcaaaattcagccgttttttgcgcgagatcgctcacccttgcttctcatcctgtggacttaccgctcagggatgagttttgtttggcttatcgctggcaaactgtctgaaatcgcagcaataaggactcatccgccatgaaactcgccgcctgttttctgacactccttcctggcttcgccgttgccgccagctggacttctccggggtttcccgcctttagcgaacaggggacaggaacatttgtcagccacgcgcagttgcccaaaggtacgcgtccactaacgctaaattttgaccaacagtgctggcagcctgcggatgcgataaaactcaatcagatgctttccctgcaaccttgtagcaacacgccgcctcaatggcgattgttcagggacggcgaatatacgctgcaaatagacacccgctccggtacgccaacattgatgatttccatccagaacgccgccgaaccggtagcaagcctggtccgtgaatgcccgaaatgggatggattaccgctcacagtggatgtcagcgccactttcccggaaggagccgccgtacgggattattacagccagcaaattgcgatagtgaagaacggtcaaataatgttacaacccgctgccaccagcaacggtttactcctgctggaacgggcagaaactgacacatccgcccctttcgactggcataacgccacggtttactttgtgctgacagatcgtttcgaaaacggcgatcccagtaatgaccagagttacggacgtcataaagacggtatggcggaaattggcacttttcacggcggcgatttacgcggcctgaccaacaaactggattacctccagcagttgggcgttaatgctttatggataagcgccccatttgagcaaattcacggctgggtcggcggcggtacaaaaggcgatttcccgcattatgcctaccacggttattacacacaggactggacgaatcttgatgccaatatgggcaacgaagccgatctacggacgctggttgatagcgcacatcagcgcggtattcgtattctctttgatgtcgtgatgaaccacaccggctatgccacgctggcggatatgcaggagtatcagtttggcgcgttatatctttctggtgacgaagtgaaaaaaagcctgggtgaacgctggagcgactggaaacctgccgccgggcaaacctggcatagctttaacgattacattaatttcagcgacaaaacaggctgggataaatggtggggaaaaaactggatcagaacggatatcggcgattacgacaatcctggattcgacgatctcactatgagcctagcctttttgccggatatcaaaaccgaaagtactaccgcttctggtctgccggtgttctataaaaacaaaatggatacccacgccaaagccattgacggctatacgccgcgcgattacttaacccactggttaagtcagtgggtccgcgactatgggattgatggttttcgggtcgataccgccaaacatgttgagttgcccgcctggcagcaactgaaaaccgaagccagcgccgcgcttcgcgaatggaaaaaagctaaccccgacaaagcattagatgacaaacctttctggatgaccggtgaagcctggggccacggcgtgatgcaaagtgactactatcgccacggcttcgatgcgatgatcaatttcgattatcaggagcaggcggcgaaagcagtcgactgtctggcgcagatggatacgacctggcagcaaatggcggagaaattgcagggtttcaacgtgttgagctacctcagcagccatgatacccgcctgttccgtgaagggggcgacaaagcagcagagttattactattagcgccaggcgcggtacaaatcttttatggtgatgaatccagccgtccgttcggtcctacaggttctgatccgctgcaaggtacacgtagcgatatgaactggcaggatgttagcggtaaatctgccgccagcgtcgcgcactggcagaaaatcagccagttccgcgcccgccatcccgcaattggcgcgggcaaacaaacgacacttttgctgaagcagggctacggctttgttcgtgagcatggcgacgataaagtgctggtcgtctgggcagggcaacagtaacttttccggcttcccgttcgtcagtacctcgggaagccgccaaccaggataaaatgtcagccctaatcagcgttgcaggataaagcaccgctcactcttcaacagaccgatttgcaccccagcaaatgtagcgttattgttaccttccttgctacagagttcgacagatatcccgctatgacattctccctttttggtgacaaatttacccgccactccggcattacgctgttgatggaagatctgaacgacggtttacgcacgcctggcgcgattatgctcggcggcggtaatccggcgcagatcccggaaatgcaggactacttccagacgctactgaccgacatgctggaaagtggcaaagcgactgatgcactgtgtaactacgacggtccacaggggaaaacggagctactcacactgcttgccggaatgctgcgcgagaagttgggttgggatatcgaaccacagaatattgcactaacaaacggcagccagagcgcgtttttctacttatttaacctgtttgccggacgccgtgccgatggtcgggtcaaaaaagtgctgttcccgcttgcaccggaatacattggctatgctgacgccggactggaagaagatctgtttgtctctgcgcgtccgaatattgaactgctgccggaaggccagtttaaataccacgtcgattttgagcatctgcatattggcgaagaaaccgggatgatttgcgtctcccggccgacgaatccaacaggcaatgtgattactgacgaagagttgctgaagcttgacgcgctggcgaatcaacacggcattccgctggtgattgataacgcttatggcgtcccgttcccgggtatcatcttcagtgaagcgcgcccgctatggaatccgaatatcgtgctgtgcatgagtctttccaagctgggtctacctggctcccgctgcggcattatcatcgccaatgaaaaaatcatcaccgccatcaccaatatgaacggcattatcagcctggcacctggcggtattggtccggcgatgatgtgtgaaatgattaagcgtaacgatctgctgcgcctgtctgaaacagtcatcaaaccgttttactaccagcgtgttcaggaaactatcgccatcattcgccgctatttaccggaaaatcgctgcctgattcataaaccggaaggagccattttcctctggctatggtttaaggatttgcccattacgaccaagcagctctatcagcgcctgaaagcacgcggcgtgctgatggtgccggggcacaacttcttcccagggctggataaaccgtggccgcatacgcatcaatgtatgcgcatgaactacgtaccagagccggagaaaattgaggcgggggtgaagattctggcggaagagatagaaagagcctgggctgaaagtcactaaaaattgcctgatgcgctacgcttatcaggcctacatgatttctgcaatatattgaatttggaagaatttgtaggccggataaggcgtttacgccgcatctggcataaacaaagcgcactgttccggcgttgagaaacgccggaaaacgtttcaaacaggctgctgccgtagccgatgccgctgcactttctcgacatccatgcactgcaacgcctttgtcgggcaggcttcaacacaggccggtcccgtctcccgatgccagcacagatcgcacttaatcgccctcgcctttttgcggctagaaacgacctccatcgcaccaaacgggcaagccagcatacagcttttacagccaatgcaacgtgtttgttcaacgaaaatatgcccatgttcgcggcttatcgcgtcaacagggcagacattcgcgcacggtgcatcttcacactgatgacaggctactgccgtggtccagcagtggtctttaatgacacgaatacgggaaataaactcgtctggactcaacgcagcgcaatcctgattctcatgatggctcactgcgcaagccacttcacaggtacggcaaccgatacatttcgtcgcatccgcaataataaaccggttcatgatcactcctttgcactaaaacagcagagtgccagagagcgcgtccctactgctttgatccaacgaaggaaatgttaaagttttggcacttgtccaaagcgttatgtgatcgcgcccaggtcatccctgacagtaaatcccagttcattagaaatagcctgcgcggtttcacgcagtggtttcaggagatttttctctcccacctgtttcagacgacttgtgctaaggctaatgctcacggcgtacggcacccgcccatgaatatcaaacaccggaacagcaatacaggagacgccgagttcgttttcttctctgtccatcgccgctccgctttcacgaatgtgcgccagttcgtcgaacatcgcgggcagctcggtaatggtattgcgggttaacggctggatctcatgctgatggctttcccagtaactcttcacgtagtccgggtgaccaaacgccatgtagatcttgcccattgcggaacagtagagcggcatatgctggccaatataggcacgggttcgcagcatcccggttgtgggttccagcttataaatcaaaatagcgtgatcgtcttcgcggctggagaagttaatggtttcaccagtggcgatgttcagtgcctcaagatgcggagcggcgatatgaatgatattcaggctagacagcgccttctgcccgacggcaataaatttggtggtcaggcgataactccctgcggcaggcgcggtggtcacatagccgcaggactgtaatccctgcaataagcgatggacggtactcttatttaaaccagccagctcgctaagatgcgccaacggacaaccgtttggatagttgctcaaaatctcaatcagcatcaacccgcgaaacagactctggcttccggctggacgctctttttcctgcgccatctcgttctctttttttcccatcacttctttccccattttgtcgcgtcctgatggtagcgcaaagtgtgccgtagttcacgatctcgacagataatttataaccaattgatttttatgtcttttgaaattcatcaatcagattgccttgttaaaaagtgatcgatatatttgaaatcaagtttcgcatattgaaattttaagccaaaaaagcgatcaaaaaaacaaggaagcctgggatgaaagtgacatttgagcagttaaaagcagcctttaatcgggtcttaattagtcgcggcgttgacagcgaaacggctgacgcctgtgcagagatgttcgcccgcaccaccgaatccggcgtttattctcacggcgttaatcgtttccctcgtttcattcaacaactggaaaacggcgatatcattcctgatgcccaacccaaacgtataaccagcctcggcgcaattgaacagtgggacgcccagcgtagcatcggtaacctgacagcgaaaaagatgatggatcgcgccattgaactggctgccgatcacggtattggtctggtggcactacgtaatgccaaccactggatgcgcggcggcagctacggctggcaggcggcggaaaaaggctatattggcatttgctggaccaactccatcgccgtaatgccgccgtggggcgcaaaagagtgtcgcataggcactaacccgctgatcgtcgccattccttccacgccgatcaccatggtcgatatgagcatgagcatgttctcttacggcatgttagaagttaaccgtctggcaggtcgtcagctcccggtcgatggtggctttgatgatgagggcaatttgaccaaagaacctggcgttatcgagaagaatcgccgcattttgccgatgggctactggaaaggttctggcatgagcattgtgctggatatgatcgctactctcctttccgacggcgcatccgttgccgaagtcacccaggacaacagcgacgaatacggcattagtcaaatttttattgccattgaagtggacaagcttatcgacggtcccacccgcgatgccaagctgcaacgcatcatggattacgttactagtgccgagcgtgctgacgaaaatcaggccattcgcttacccggccatgaatttactaccctgctggccgaaaaccgccgtaacggcatcactgttgatgacagcgtgtgggccaaaatccaggcgttatgaggagataagtcatgatttttggacatatcgcgcagcccaatccgtgccgtttgcccgccgccattgaaaaggcgctcgattttctgcgcgctaccgatttcaacgccctggagccgggcgttgtcgaaatcgacggcaaaaatatttatacgcaaattatcgatttaaccacacgcgaagcggtggtaaaccgtccggaagtgcatcgtcggtatatcgatattcagtttctggcgtggggcgaagagaaaatcggcattgctattgatacgggaaataataaagtcagcgaaagtctattagagcagcgcaatattattttttatcacgacagtgaacatgaaagttttatagaaatgataccgggcagctacgcaattttctttccgcaggatgttcaccgaccaggttgtattatgcaaacagcctctgagatacgaaaaattgtggttaaagtcgcattaacggcgctgaattaatcgaataatcgtctacgccagaacgcctgggtaatgttattgctctaactatattaataattcaggttgctgcacatgcgacttgaattatgacagacatagcctcaaggaatagctatgaaaaaaatactcgaagcaatactggcgattaatctcgccgtactttcctgtattgtatttataaacattattttaagatatggttttcagacaagcattttatctgttgatgaattgagtcgttatttatttgtctggttaacgtttattggcgcgattgtagcttttatggataacgcccacgttcaggtcacctttctggtggagaaactctcccccgcatggcagcgacgagtcgctctggttacccattccttaatcttatttatttgtggcgcactggcctggggcgcaacgctaaaaacaattcaggactggagcgattatagtccgatcctcggtttacccatcggcctgatgtatgccgcttgtctgcccaccagcctcgttatcgcattctttgaactgcgtcatttatatcaactcatcacgcgtagcaattctctaacgagcccaccgcaaggagcttaatcatggctgtgctgatttttctgggctgtctgttgggtggtattgctatcggtttgcctattgcctgggcactgttgttgtgcggggcggcgttaatgttctggctggacatgtttgatgtccagatcatggcacaaacgctggtgaacggagccgatagcttctccctgctggcgattccgttctttgtgctggcgggtgaaatcatgaatgcgggcggcttgagtaaacgcattgttgacctgccgatgaaactggtggggcataaaccaggcgggctgggctacgtcggcgtgctggcagctatgattatggcgagcctttctggttctgccgttgcggataccgccgccgttgccgctctactggtgccgatgatgcgcagcgccaactatccggtcaaccgggcggcggggctgattgcctctggcggcattatcgcgccaattattcccccttccattccgtttattatcttcggcgtttccagcggattatccatcagtaagctgtttatggcgggcattgcccctggcatgatgatgggcgcaacgctgatgcttacctggtggtggcaggccagtcgccttaatttaccccgccagcaaaaagcaacgatgcaggaaatctggcactcttttgtctccggtatctgggcgctgtttcttccagtcatcattattggcgggtttcgctccggcctgtttacccctaccgaagccggggccgttgctgctttctatgcgctgtttgtcgccacagttatttaccgtgaaatgaccttcgccacactttggcatgtactcattggcgcggcgaaaaccaccagtgtggttatgtttctggtggccagcgcacaagtttccgcctggctgattaccattgctgaactgccgatgatggtttctgatttactgcaaccgttggtcgatagtccgcgtctgctgtttatcgtcattatggtggctatcctgattgtcggcatggtcatggatttaacgccgacggtattaattcttaccccggtattaatgcctttagttaaagaggcaggaatcgatccgatttatttcggtgtcatgtttatcattaactgcagtatcggcttaattacaccgcctatcggtaatgtacttaacgttattagtggggtggcaaaactcaaattcgatgatgcagtcagaggcgttttcccttacgtcctggttttatatagtttattagtcgtatttgtttttattcccgatctcatcatcctccctttgaaatggattaattaaaaggaaaatattatgaaattacgctctgtaacctacgcattattcattgctggcctggctgcattcagcacatcttctctggcggcacaatctttacgtttcggttatgaaacaagtcaaaccgacagccaacatattgcggcgaaaaaattcaatgatttattgcaggagagaaccaaaggcgagctgaaattaaaactgttcccggacagcactctcggtaacgcgcaggcgatgatcagcggcgtacgtggcggcaccatcgatatggaaatgtccggcagcaataactttgccgggttaagtccagtgatgaacttgcttgatgtccctttcctgttccgcgataccgctcacgcgcataaaacgctcgacggcaaagtcggtgatgatctgaaagccagtcttgaaggtaaaggactgaaagtactggcctactgggaaaacggctggcgcgatgtcaccaacagccgcgcaccggttaaaacccccgccgacctgaaagggctgaaaatccgcaccaacaatagcccgatgaatatcgccgcattcaaagtctttggcgctaacccgatcccgatgccgtttgccgaagtctataccgggctggaaacccgcactatcgacgctcaggaacacccgatcaacgtcgtctggagtgcaaaatttttcgaagtgcagaagttcctttctctgacgcaccacgcctattccccgcttctggtggtgatcaacaaagcgaagtttgatggcttaagtccggagttccagcaggcgctagttagttctgcacaagaagcgggtaactatcagcgcaaactggttgctgaagatcagcaaaaaatcatcgacggcatgaaagaagcgggcgtggaagtcatcaccgatctcgaccgcaaagcctttagcgacgcactggggaatcaggttcgcgacatgtttgttaaagatgtgccgcagggagctgatctgctgaaagccgtggatgaggtgcaataaaccatgacgcaatactggctggggttagattgtggcggtagctggctgaaagccgggctgtatgaccgcgaaggccgggaggcaggcgtgcagcgcctgccgctgtgcgcattaagcccgcagccaggctgggcagagcgcgatatggcagaactgtggcaatgctgcatggctgtcattcgcgccctgcttactcattctggtgttagcggggaacaaattgtcggtatcggcatctccgcacagggaaagggcttgtttttgctggataaaaacgacaaaccgctcgggaatgctattttgtccagcgaccgccgggcgatggaaatcgttcgtcgctggcaggaagatggcatcccggaaaaactctacccgctgacccgacaaaccttgtggaccgggcatccggtgagcctgttacgctggctgaaagagcacgaaccagaacgctacgcgcaaattggctgcgtgatgatgacgcacgactacctgcgctggtgtttaactggcgtcaaaggctgtgaagagagcaatatttccgagtccaacctctacaacatgagtcttggggaatatgacccgtgcctcaccgactggctggggatcgctgaaatcaatcacgccctgccgcctgttgtcggatctgccgaaatctgcggggagatcaccgctcagacagccgccctgaccggtctgaaagcgggtacgcccgttgttggcggcctgtttgatgtggtttccaccgcactctgcgccgggatcgaagacgaatttaccctcaatgcggtgatggggacctgggcggtgaccagcggcataacccgcggtttacgtgacggtgaagcgcatccgtatgtctatggtcgctacgttaacgatggtgaatttatcgttcacgaagccagccctacctcttccggcaacctcgaatggtttaccgcacagtggggagaaatcagctttgatgagatcaatcaggccgttgccagcttgccgaaggctgggggcgatctctttttcctgccgttcctgtacggcagcaacgccggactcgagatgaccagtggtttctacgggatgcaggccattcacacccgcgcgcacctgttgcaggccatctatgaaggggtggtgttcagccatatgacccacctcaaccgaatgcgcgaacgttttactgatgttcacaccctacgcgtcactggcggcccggcgcactccgatgtctggatgcaaatgctggcggacgtcagcggtctgcgtatcgagctgccgcaggtggaagaaaccggctgctttggtgcggcccttgccgcccgcgtcggcaccggggtttatcacaacttcagcgaagcccaacgtgacttgcgacacccggtgcgcaccctgctgccagatatgaccgcccatcagctttaccaaaaaaaatatcaacgttatcagcatctcattgccgcacttcagggctttcacgcccgcattaaggagcacacattatgagccgaccacttctgcaactggccctcgaccacagtagtcttgaagccgcgcagcgcgacgtgacgctgttaaaagacagcgtcgatatcgtcgaagcgggcaccattctctgtttaaacgaagggcttggcgcggtgaaagccttgcgcgaacagtgcccggacaaaatcatcgttgctgactggaaggtcgccgacgctggtgaaacgctcgcgcaacaggcgtttggcgcaggcgctaactggatgaccatcatctgcgccgcgccgctcgcgacggtagaaaaaggccacgcaatggcacaacgctgcgggggtgaaattcagatagagctgttcggtaactggacgctggacgacgcccgcgactggcatcgtattggcgtgcggcaggccatttatcatcgcggtcgtgatgcacaggccagcgggcaacagtggggcgaagccgatctggcacgcatgaaggcgcttagtgatatcggccttgagctttccattactggcgggattacccctgctgacctgccgctgtttaaagatatccgcgtgaaagcgtttattgccgggcgggcactggcaggcgcggcaaatccggcgcaagtggctggcgatttccatgcgcaaatcgacgctatctggggaggtgcgcgtgcgtaatcatcagttagggatttatgaaaaagcgctggcgaaagatctctcctggccggagcggctggtgctggcaaaaagctgcggttttgattttgtcgaaatgagcgtggatgaaaccgacgaacggctcagtcgtcttgactggagcgccgcacaaaggactagcctggttgccgcgatgatcgaaacaggtgttgggatcccgagcatgtgcctgtccgcacatcgtcgctttccctttggtagccgtgacgaggcagtgcgcgaacgggcgcgggaaatcatgagtaaagcgattcgcctggcgcgcgatctcggcattcgcaccatccagctggcaggttatgacgtctattacgaagaccacgacgaaggcacccggcaacgttttgctgaagggctggcgtgggcagtcgaacaggcggcggcaagtcaagtaatgctggcggtggagattatggataccgcgtttatgaactccatcagcaaatggaaaaaatgggacgagatgctcgccagtccgtggttcaccgtctacccggacgtcggcaacctcagcgcctggggcaatgatgttcccgccgaactgaaactgggcattgaccgtatcgccgcgatccacctgaaagacacccagccagtcaccgggcaaagtcccggacagttccgcgacgtgccgtttggcgaaggctgcgtcgatttcgttggcatcttcaaaacgctgcataaactgaactatcgcggttctttcctgattgagatgtggaccgaaaaagccaaagagccggtgctggagattattcaggcgcggcgttggattgaagcgcgtatgcaggaggctggatttatatgttaacgtaaatgcaggaggctggatttatatgttagagcaactgaaagccgacgtgctggcggcgaatctggcgcttcccgctcaccatctggtgacgttcacctggggcaatgtcagcgcggtagacgaaacgcggcaatggatggtaatcaaaccttccggcgtcgagtacgacgtgatgaccgccgacgatatggtggtggttgagatagccagcggtaaggtggtggaaggcagcaaaaaaccctcttccgatacaccaacgcatctggcgctctaccgtcgctatgccgaaattggcggtattgtgcatacccacagccgccacgccaccatctggagtcaggccgggctggatctccccgcctggggcaccacccacgccgattatttttacggtgccatcccctgcacgcgacagatgaccgcagaggagattaacggcgaatatgaatatcagaccggcgaagtgatcattgaaaccttcgaagaacgtggcaggagtccggcacaaatcccggcggtgctggtgcattctcacggcccgttcgcatggggtaaaaacgccgccgatgccgtgcataacgccgtagtactcgaagaatgcgcctatatgggtctattcagccgccagcttgcgccgcagctccctgcgatgcaaaacgaactgctggataagcactacctgcgtaagcatggggccaatgcctattacgggcagtaatccctcacgccggggcttcatcgccccggcactacgaattgatatgttccttgctgtaacgccgcttccacgctgctggcgttaaaccagtatgtttctgaaaaatctgccggaaatagccaacgtcattaaaccgtattgcatggagcaggccgacaacgtcgagtcactgcataacctgttgctgcccgccgatgcgccatttacgacatttgaaggcaagggattgttcagccataagatcctgattcagacgccaggttcccggtatgaacagagcaatccagagcaacaacctttgtggcattacgacggagcaccagccgcaccgacatccaccggtgaattaaaaacgccagctcaccccggtgacaaaggtaaaactctcattacgatcaatcatcgggctgtcggtaatctcttccggcagctcgctgtatcctgcgctcgccatcaatacgacgtgctctcctatcgggtattttgccgtcaggctgacatagggcacccaggcatcctgcgcggaataacttgccagaccgctacgacgggactcactctcactaatgccatagtaatagtcactgaaattctcgtcataatagagaacgcccagcgcaggtgtcaggctcagacgacctatccgcattttgtggaatacgcttagctcccccacccagccgttgctgttatccagaacgtccgcagctgcagaggctttcacggttccccaacgctcgtggtgataccaggcaacccccgccatagccgtactatcacgcttatcaagctgttgcatggcataatcgtcattatcggtagggtcaaattccagcggcatccaggatgcggtcaggctaagttcatttttttcactttggctcagaataaaacctaacgtggtctgacgaacataaaaagtatcaccttcataactaatcagcggaattgccttcgtattttcattataaccgcgataagggctttcattataagccgcaccagcaccaatggataattcagaagcagttgcgcttgccataaaaggcaacgcaaataacgccacaatattgcgattaattaacatgtccggtattccattttaaaataagataaaaaagagtcggcataataatgcttacaatttctccggtgcaagattcatatttatatagtaatatataaaattatatataattgggctgttgcgatgacaaaattacaacttaagtaccgggagttaaaaattatcagcgtaatcgctgccagtgaaaatatcagccatgccgcgactgtacttggcatcgcacaggccaacgtcagcaaatatcttgctgattttgaaagtaaagtgggtttaaaagtccttgaccgaaccacccggcagctgatgctcacaccttttggcaccgcgctgttaccgtacatcaacgacatgctggacagaaacgagcaacttaataattttattgcagattataagcatgagaaacgtggtcgggtcaccatctacgccccaaccggcataattacctatttatccaaacatgtaatcgataaaattaaagatatcggtgatatcaccttaagcctaaaaacctgcaatcttgagcgtaatgccttttatgaaggcgtcgaatttcctgatgattgtgatgttttaatcagctacgctccaccaaaagatgaaagcctggttgccagttttattacccaatatgccgtaaccgcttatgccagccagcgctatcttgagaaacatcccattagccgtcctgacgaactcgaacatcactcctgtattttgatcgacagcatgatgatcgacgacgcgaatatctggcgcttcaacgtcgccgggagtaaagaggtgcgggattatcgcgtgaagggaaattacgtttgcgacaacacgcaatctgcgctggagctggcacgaaatcacctggggattgtgtttgcgccagacaaaagtgtgcagagcgacctgcaagacggcacgctggtgccctgctttcagcaaccctatgaatggtggctggatctggtggctatcttccgtaaacgggaataccagccctggcgggtccagtatgtgctggatgaaatgctgcgtgaaattcgccaccagcttgctcagagccagcaactgcggcctgaacaagcggcggaaagcgaagattaatgatcgagataaaggtaatgcacccagctggtcatgcgtaatagcactttgcgcatcacgctgacatggctgaaatgatcagagtaaaccgccacctgggcgtaaataccgtctggtaaagcgctcaaatcagtgtgctcatccagttcaatggtcgcgataacgccatcactacccggcgctgtgtttaacgtctgtaaggtgccggtgctctgataagctccgccgggaacggctggactaatggctgccagcttaccgctgaataccttacctggcagagcattaaacaccacttccgcatcgtcgccaggagccagtcgcagcaaggagttctgacggaactgcgccacgatttgtcgtttctgatcgggtataaacaccatcaccggacgtagcggcaggctcgcggcataggtacccggacgaatcagtacctgggtcacataaccatcgctcggcgcacgcactatcgtctgctcaaggttatattttgcttccgcgagctgtgctttcaggctggcgatttgagaatgttcacccaacaccaggctatccagctggctctggatctgtttttgttccgccgcgctactcttcacggaggcttcctgcgccagataattttgccgcgccacatcgatatcgcgttcactaaacgggtttactttcgcctggctgccacgtgcgtaacgctgatactctttagcgaatttatcccgcgtggcctttgcctgctgagtattcgccgccatctcatctaactctgcgcccaacgcccgctgtttatgttctgcggtaacgatatccgccatcagccgatccacccgcgcctgataacgcgtcgggtccagtcgaaatagcacctcaccttttttaatcagcgtatttttcttatccgtcacttcaatcaccacaccagtcacctgtgggacaacaggaatagaaataaccgctttttgcgctttaaaggtatacggatggttatagttcattaacagaattagaccgctgacaataaatattccacccagggccgctgtgggaatggtccatttatttacgggaattttgaagatcttaaacattgcccatgcaaaagccacataggtcaaaataatcagtaaatccataagtattactcggcagaagaggatttgatgtcggcgagctgtttctccagcccggcaatgcgctgttgcagttgcataacggaactatcatggctttgcattccccatccccgctccgggcggtaaagcgtggcccaaatccacaaaaacggccagataacatgtaacgtaaaaagactcacccaaccagcaacatgaatggcgtcggcatgaggatgattacgttttttggcaatcaggtagggaatatcatgtaaaataatgatcccatagaagatcaccagaaatacaaaaataagcactcccagtgcaaaatagtccaggaacatatttccctcaaagaatataaaaaagaacaattaacgcatattatgaaatgccatgatgcagtgcaatttccttatttatataacgacatattgttttttatatactttcttaaatgtgctgtctggtttttcaacaggacgaggtttatcatattgaaatagtggaactattggccaaactaatgaataactccagtaaaacatccacagtacagattaagcgtattaaaccttcaattatctaccgtttattgctgattggcctcggatcaccaatggtgatttacggcctggttcgcccgctcaccatcgaaacgcgagattaaactcctgacaaaacacgccccagaaacgtacttctgttggcgtagtctgggttattgcgcacgtaggtttaaaacgtaaattgtaacaacgtgcgctttgtttatgccggatgcggcgtgtacgccttatccggcctacggtcaggttcccgtaggcatgataagacgcgtaagcgtcgcatcaggcaatgaatacccaatgcgaccagcttcttatatcagaacagccccaacggtttatcgctgtagctcaccagcaggcacttggtttgctggtaatgctccagcatcatcttgtgggtttcgcgaccgataccactttgtttgtagccaccaaacgccgcatgtgccgggtaagcgtgataacagttggtccacacgcgcccagcctgtatgccgcgccccatcttataggccagattaccgttgcggctccagacgcccgcgcccaggccatattgcgtatcgttcgccagctccagcgcttcttccatcgttttgaaggtggtcaccgccagcaccgggccaaaaatctcctcctggaacacccgcatattgttctgaccaaacagaatcgtcggttcgaggtagtagccgtctttcagttcaccttccagcagcttgcgccgcccgcctgtgagcacgtcagcgccctcttttttaccgatatcaatgtagttgaggatggtttccagttgcccgtgagaaacctgcgcgcccatttgcgtcacgctgtcgagcgggttaccgctacgaatgctttcgacacggcggatggcgcgttccataaagcgttcgtagatagattcctgcactaaagcacgactcggacaggtgcaaacttcgccctggttaaaggcaaacagtgcaaagccttccagcgctttatcgaaaaaggcatcttcttcatccatcacatcagcaaagaagatatttgggctcttaccgcccaactccagcgtcaccggaataatgttttgcgttgcgtattgcataatttgttggcccacttccgtactgccggtaaacgccactttggcgatgcgtttgctggtcgccagatattcgccaattaccccacctgcgccattgaccacgttcaccacgcccggcggcagtaaatcaccgacaatttccattagcagcagtacagaaagcggggtaagacgtgcgggtttcagcaccacacagttgcccgccgccagcgcgggagccattttccagctcgccatcagcagcgggaagttccacgggataatctgccccaccacgcctaacggttcatggaaatgataggccacggtttcgctatcaacttcactgatcccaccttcctgcgcccgaatacagctggcgaaatagcggaaatggtcaatcgccagcggtacatccgcagcactggtttcgcgaatgggtttgccgttatcccaggtttcagctgtcgctaacagctcgaggttttgttccattcgatcggcaatcttaaacagaatcgccgcacgatcctgcacgctggtgtgcgcccatttatctttcactttgtgcgcagcatccagcgccagatcgatgtctcgtttgccgctagacgccacttcgcacagcagctgcccggtcaccggcgtcagattctggtaatactcgccgtcggcaggggctacccattcgccgccaataaagttgtcatagcgggcttttaacttgagggggaaaccatactcgccgggcttaatctgtgcactagggggattattggtcatgatcgtctccttgcggtgtgaggtataacaagggtagacgtgactggcgaaatcttcgccagtcggtaacagctttacgacagctatcacgaatttacgggcaagggttacagagatagttgaaaaagcggctaacaatttgccagccgttgtggaaatgatgattacatcgctgcgcgataaatcgccacaatttcttcgtgagttgcctggatcgggttagtaaagccacaggcatctttcagggcattagtcgccaataccgcgaaatcttcttctttcacgttcaggtcgcgtaggcctgccgggatatccactttcttcgccagttcacggatggcgttaatgcaggcttcagcaccttccgcgtcgtttttacctgtcacgttcacgcccattgcagcggcacagtcacgcagacgtgcagcggcgactttgctgttgaatacctgaacgtgcggcagcaaaacggcgttacatacaccgtgtggcaggttgtagaaaccgcccagctggtgcgccatcgcatgaacataacccagagaagcattattgaacgccataccggcgaggaactgggcataagccattgcttcacgcgctttcgcattactgccatcttcaacggctaacggcaggttttcggcaatcatggtcacggctttcagtgcacaagcgtcagtgatcggcgtggcggcaatagaaacatatgcttcgatagcgtgcgttaaggcatccatacccgttgcggcggtcagactcttcggcataccaatcatcagagaggagtcattgacagaaagcagcggagtgacatgtttatcaacaatcgccattttgatatgacgcgcttcgtcagtgatgatgcagaaacgggtcatttcagaggccgtacccgccgtggtattgatggcgatcatcggcagctgcggttttgcagagcggtcaacgccttcgtaatcgcgaatatcgccgccattggctgccaccagcgcaataccttttgcgcagtcgtgtggagaaccaccgcctaaggagatcacgctatcgcaattattctctttaagtaatttcaaacctgcggcgacgttttccgtggtggggttaggttgggtgccatcataaataacgctaaaaatattgcgttcttccagtgctttttgcacatcgcccgccatacctaatttcgttaacatattgtcagtgacaattaaggtacgggtaaatccataatctgccatcatattcattgcatcagtcaaactatcagcgccgatgacattcacagaaggaataaagaacgtactagctgccataacacactcctgaaagtgtaaaaaagggcgggcagcttactgaggattttcattcgaaaatatgatcagtattattgattatcaaaattaatctaataaaaagcacattgtattcattaaacaatgtgctttttttaaattcataagaattttgtattaatttattttaaaacttaattaatcatttccttatttttccggaaataataatgcgtcgcgcaataaatgatcatttccacgacgacgcgtaaagccaatgcggtcaaaatattccagaatctgaattgccagctttcggcctacgcctaagcgatcgcggaaatccgccgcgcaggtactaccacactcctgatcgagatcgcggatcatattggcaaactcgacaatccgatcgttacggtaataacgatctttaacgatcgcggtaattattccttgctgcgccgcctggcgtagagtcaggcgcattgcctgctcgtcggttcccgtctcttttgccaggtcacgcacccaccacggttcgtcaccaaacagtggctctgctttttgccagatggcctgctgctcttcgctgaagcccgctttgtgatctggcagatgcagccagccgtgatggctgtggatgtcgccgctttcgcgcatcttttcaatcagcaacagtaccagcgcttcatcttccattggcaacgccatacgtcgcagacgttcgcgcccagggccaggttcatcgcgatgttgctcatgataagtcgctaatgtgtcgagaattttccgctgccagcgggcggcaaccggcgcattcaacaagctataaccagcctgaatataaccaggctgttgcagcaattcgcgcatcccttcgccgttgagctggcgcgcccaggcgaaatccgcaaggttaaccgcgccgcgttccagatgaacagataacgcatcggcatcgctctgcgcccgtgcaagagacgccagccattgcagatattccggcttacgtttaccgcgacgcggcgggttaagcatcacgacgcgcgctccggccagcgtgttgcgggcagagatatcgcgcaataccaggcggtcgttatctgccagccataacggggtgtcgaagaccagttcagcaaggttatcttccagcagactaacgcgtcccgtgacgtggctggcggcgtggtgaatatgcagcggctgccactgggtcagcggtgtatgggtttgaagctcgacaatcacccgtgtgaacggctctggcggcacatcggcaagcagccagtcgccacggttaatctgctctttttccgcatcacccgcgatgttaagcgcgatacgctgcccggcattggcggtttctgttggctggttttgcgcatgcagcgcacgtacacgcatcggtttatttacaccagtcagccagagactatcgcctaccttcacttccccgcttaacgccgtaccggtgacgaccagcccggcaccttttacggtaaatgcgcggtcaatcgcgaggcggaaactatgttggctggcgtgctcgcgttccggcaactgaagcagatgctcgcgcagggcatccattccccgaccttcggttgctgcggtgataaacagttttgcctcagcaaaaccgtattcccgcagaacctcctttacctggcgttcaacctcatcaacacgcgcttcgtccacgcgatcggctttggtcagcgccactgtcagcatcgggttaccggtcagctgcaaaatcgccagatgctcacgggtctgtgccatcacgccgtcatcgcacgccaccaccaacagcgcgtgatcgataccaccaacgcccgccagcatgttggaaagaaacttttcatgaccgggaacgtcgataaaaccaggcacgcgaccatccggctgcggccagtaggcatagccgagatcgatggtcatgccgcgctttttttcttccggcagacggtcagcatttacgccagtaatcgcctgcaataaggttgttttgccgtggtcaacgtgtccggcagtcgcaataatcatttcaacaacatctccaaaaaccgttgctcatcttcaaggcagcgtaaatccagccacaatcgtccgtcataaatacgaccaatcaccggcactggcaattcacgccagcgggcggctaaactctcaaggtggctaccgcgtccatcatggggtgtaaacgttaatgccgcgctcggcaggcgatcaaccggcaggctaccactgccaatctggctaagacatggcataacctgtaccgcaaactccgcgccgtaatgtgcggcaaggggggcctgtaaacgttgtgcctggatttgaatgacctctgcgctgcgggtaagcaggcgcagggtcggtaatttttcactcagagcttcagggtgtaaataaagacgcaacgtggcttccagcgccgcgagggtcattttatccgcgcgtaatgcacgcttcagcgggtggctttgcaggcgggcgatcatctcttttttaccaacaataattcctgcctgcggcccgcctaacaacttgtcgccggagaaactcaccagactgacgcccgccgcaatcaactcctgcggcattggctctttcggcaaaccgtactggctaagatcgaccaggctgccactgcctaaatcagtcactacgggaacatccagctctttgccgagcgccaccagttccgcttcatctatcgctttggtgaacccctgaatgctgtagttactggtatgtactttcatcaacagtgcggtattttcattcaccgcctgacgataatcattcgcgtgcgtgcggttggtggtccctacttcgtgtagggtgcagcctgcctgacgcataacatcgggaatacgaaacgcgccgccaatctccaccagttcgccgcgagataccaccacctcttttccgctggcagtggccgccaacatcaataacaccgccgccgcattgttattgacgatacaggcatcttccgcccccgtaatacggcacagcagctgcgccagcgcccgatcgcgatgtccgcgtccggcgtcgtccagatcatactcgagggtcactgggctacgcatagcctgcgcaacggcttccaccgcggcttccgcctgtaaagctcgcccaaggttggtatgcagcacggttcccgtcaggttgatcaccggacgcagcgcgctctgcgcttctttcgtcaaccgggcatcgacttcttgcgcccagttttcacaccacgcaggcagcgtctggctgccacgaatcacttctcgcgcttcgtcgagcatctgacgcaacaattccaccacgcgggtgtgaccataagtatcacgcaaagaaaggaaggagctatcgcgcaataagcgatcaatagccggaagttgactatagagggaacgcgtttcggttgtcataggaaacctggctgatcaaggccctctcacacggagaagggcgtttaacataaccacggattgtaacgtgagatgggtcaggaggacatatcgcgcatcaagcctttggcggttcggtgcgagcaaaactttcgcggctaaacaggttttcgaccagtttgactaagtgtgggcggtcgacacaccaacctggcgcaacgcggcggaaattgagatatccgacggcacaggcaatggcgatagtcgccagattgaccgtatcggttttgagtgtgccatcgaccagatatccttccagcacatccagactgcggttgattttctcccgctggcgtaacaattcatcttcagactgctgcgccgctggacgcgcctgttcacgcacgcttaccagcccggcatccataatgccatccgccagtgcctcaattttgcgcacccgcaagctctccagcggatcgcgcggcaacatcgccggagcgacattcattaattcaatatattcagcgatgatcgggctatcaaaccagcattcgccctcttcggtcaccagcaccggcacttttcctaacgggttaaattgcgccacgccgttgtccgcgttatagggcagttcattaataaattcgaaagttatgcccttttctaacaacagaatagaaagtttgcgtacaaacgggctggtgtagctaccgacgagtttcatgccgagtcctttgtgcgaggaaaaatatcagtatggctcaatgatccaaataaagataatgcatccagctggtcattcttagcagcactttccgcatcacgctaacatggctgaaatggtcggagtaaaccgccacctgggcgtagatgccgtcgggtaaggcatcgatatcatcgttagggtccagttcaatggttcccagcacaccgtccgtgccgggcacgaccgttaaactttgcaataccccctgcgcctgataagaaccgcctggcacgacaggtaaaatactagtcagtttgccgtgaaacacctgcccaggtagcgcgttaaacaccacttccgcatcatcgccaggtttcagacgtaacaggctgttttgccgaaattgggcgacaatttgccgtttttgctcggggatgaagaccatcaccggacgcagcggcaaggcagctgcgtatgtacctgggcggatcagtacctgagtaacgtagccattgctcggcgcgcgaatgacagtctgctcaaggttatattttgcttcagtaagttgcgctcttaagctcacaatctggctttgctcgccgttaaccatactgtcgagctggctctggatctgcgcctgctccgccacgctgcctttcaccagcgcatcctgcgcgaggaaattttgccgcgcatcgtcgatgtcacgttcgctgaacggattcaccgccgcctggctgcctttcaagtaacgttgataatttttaaacagacggtcgcgctccgcactaacctgggtggtgttggcctgcgcttcagtgagctgcgcacgcagcgtctttatattatgcgtcgccgtcatcaggtcagcctgaagtctgtcaactcgcgcctggtaacgaaccgggtcgagcttaaaaagcacctcgcccttttgaataagctgattattcttgtcagtgacttcagtaacaattcccgtcacctgtggcgtgatagggatcgctatcactgccttttgcgcggtaaaagtgtaagggtggttgtagttcatcaacaaaatcaaaccactcaccagaaacacgcctcccagcgccgccgtcgccagcgtccactgatttaccggaatgcggaagattttaaagaccgcccacgccagcgccacgtaagttaaaacaatcaatagatccataattagatctccgggaacgtggaatagtcagtctttttctcggcggcgagttgatgctccaaccgggaaattcggtcagaaagtgcggcgatttccgggtcagtcgctttctcctggctcgcaacatgactctgcataccccagccacgctccggttgatagagcgtcgcccagatccacagaaacggccagataacatgcagagtaaacaggctcacccagcccgccgtatgaatagcgtcggcatggggatggttgcgctttttggcaatcagataagggatgtcatgtatcgcgatgattccataaaaaatcaccagaaagacgaagatcagcactcccaacgcgaaatagtttagaaacatatctgcctcggattcacgtttatcagtgttgtttttgggctggcagccagaagggagtcaggctgatattttgacaataatccgggttcgcgattctcgccataacaccaaagaataatttttagaggtgatgagttgcttagttacataacgattgtatgacgaaggcataacatgctgtagatcacatcaggtgaacgccgtaagaaaatatcttgtgattcagatcacaaagattcaacaaaccatcaaaacaaaaatgtgacactactcacatttaaatgccatttttagcgaaaatcgccgccttgttgcttttttacacaagcgttttgtgatgaacgtcacgtcaattacctctctaccccctatatttatgtgattgatatcacacaaaaggccgtcgactggacagttaaccgattcagtgccagatttcgcagtatctacaaggtccggctacctctgccgccacattaacaaaaaacctcgggcttccagcctgcgcgacagcaaacataagaaggggtgtttttatgagttccgatattaagatcaaagtgcaaagctttggtcgtttcctcagcaacatggtgatgccaaatatcggcgcgtttatcgcgtggggtatcatcaccgcgttatttattccaacagggtggttaccgaacgagacgctggcgaagctggtcgggccgatgatcacttatctcctgccgctgctgatcggttataccggtggtaagctggtaggcggcgaacgtggcggcgtagtcggtgccatcaccaccatgggcgttatcgtcggcgcagacatgccgatgttcctcggttctatgattgcaggtccgctgggcggctggtgcattaagcacttcgaccgctgggtagacggtaagatcaaatccggttttgagatgctggtgaataacttctccgcaggcatcatcgggatgatcctcgctattctggcattcctcggcattggcccgattgttgaagccctgtccaaaatgctggctgcgggcgttaacttcatggttgtccatgacatgctgccgctggcgtctatctttgttgaaccggcgaaaatcctgttcctcaacaacgccattaaccacggtatcttcagcccgctgggtattcagcagtcccatgaactgggtaaaagtatcttcttcctgattgaagctaacccaggtccaggtatgggcgtgctgctggcgtacatgttctttggtcgtggtagcgctaaacagtctgcgggcggtgcggcaatcatccacttcctggggggtatccacgaaatctacttcccgtatgtgctgatgaatccgcgtctgatcctcgcagtcatcctcggcggtatgactggcgtgttcacgctgactatcctgggcggtggtctggtttctccggcatctccgggttctatccttgctgtactggcgatgacaccaaaaggtgcttacttcgctaacatcgcgggtgtgtgtgcggcgatggctgtctccttcgttgtctctgctattttgctgaaaaccagcaaagtgaaagaagaagatgatattgaagcagcaactcgtcgtatgcaggacatgaaagctgagtctaaaggcgcatctccgctgtctgctggcgatgtgactaacgacctgagccacgtacgtaaaatcatcgttgcctgtgacgccggtatgggttccagtgcgatgggcgcaggcgttctgcgtaagaaaattcaggatgcaggtctgagccagatttctgttactaacagcgcgatcaacaacctgccgccagatgtggacctcgtcatcactcaccgtgacctgaccgaacgcgctatgcgccaggttccgcaggcacagcatattagcctgaccaacttcctcgacagcggcctgtacaccagcctgaccgaacgtctggttgctgcccaacgccacacggcaaacgaagagaaagtaaaagacagcctgaaagacagctttgacgattccagtgctaacctgttcaagctaggcgcggagaacatcttcctcggtcgcaaagcggcaaccaaagaagaagcgattcgttttgctggcgagcagctggtgaaaggcggttacgttgagccggaatacgttcaggcgatgctggatcgtgaaaaactgaccccgacttatctgggtgagtctatcgcggtgccacacggtacggttgaagcgaaagatcgcgtactgaaaacgggcgtcgtgttctgccagtacccggaaggcgtgcgcttcggtgaagaagaagatgacattgcccgtctggtgattggtattgctgcccgtaacaacgagcacattcaggttatcaccagcctgaccaatgcactggatgatgagtccgtcatcgagcgtctggcacacaccaccagcgtggatgaagtgctggaactgctggcaggtcgtaagtaatccaatcccaccctctccacatggagaaggtggggttaattgcctgatgcgctacgcttatcaggcctacaggatgcatcacaatttgttgaatttgcacgttcttgtaggccggataaggcgcttacgccgcatccggcgctgcccctctcctcacggagagggtttgggtgagggaaaagcctcaccccagccctctcgggtaaaaacattgatgaaggttaatactatgaaagcattacattttggcgcaggtaatatcggtcgtggctttatcggtaaactgctggcagacgcgggtatccaactgacgtttgccgatgtcaatcaggtggtacttgatgccctgaatgcccgtcatagctatcaggtacatgtggttggtgaaaccgagcaggtagataccgtttccggcgtcaatgctgtcagcagcattggtgatgatgtcgttgatctgattgctcaggttgatttagtcactaccgccgttggcccggttgtgctggaacgtattgctccggcaatcgccaaagggcaggtgaaacgtaaagaacaaggtaatgaatccccgctgaacatcatcgcctgtgaaaacatggtacgcggtaccacgcagctgaaaggccatgtgatgaacgccctgccggaagacgccaaagcgtgggtagaagaacacgttggctttgtcgattccgccgttgaccgcatcgtaccgcctagcgctagcgcaactaacgatccgctggaagtgacggtagaaaccttcagcgaatggattgtcgataaaacgcagttcaaaggcgcactgccgaacatcccaggcatggagttaaccgacaacctgatggcatttgtcgaacgtaaactcttcaccctgaacacgggtcatgctataaccgcgtacctcggaaaactggccggtcatcagaccattcgtgacgcgattctcgacgagaaaatccgcgcggtggtaaaaggtgcgatggaagaaagtggtgcagtattgatcaagcgctacggctttgacgctgacaagcatgcggcgtacatccagaaaattctcggccgttttgagaacccgtatctgaaagatgatgtagagcgcgtaggccgtcagccactgcgtaaactgagtgctggtgaccgtctgatcaagccactgctcggtacgctggaatatggtctgccacataaaaacctgattgaaggtattgccgctgcaatgcacttccgcagtgaagatgatccgcaggctcaggaactggcagcactgatcgctgacaaaggtccgcaggcggcgctggcacagatttccggtcttgatgccaacagcgaggttgtatccgaggcggtaaccgcttataaagcaatgcaataatggtggaccaggcgcaggacaccctgcgcccgaataacagattgagtgatatgcaggcaacaatggaacaaacccaggcctttgaaaaccgtgtgcttgagcgtctgaatgctggcaaaaccgtgcgaagctttctgatcaccgccgtcgagctcctgaccgaggcggtaaatcttctggtgcttcaggtattccgcaaagacgattacgcggtgaagtatgctgtagaaccgttactcgacggcgatggtccgctgggcgatctttctgtgcgtttaaaactcatttacgggttgggcgtcattaaccgccaggaatacgaagatgcggaactgctgatggcattgcgtgaagagctaaatcacgacggcaacgagtacgcctttaccgacgacgaaatccttggaccctttggtgaactgcactgcgtggcggcgttaccaccgccgccacagtttgaaccagcagactccagtttgtatgcaatgcaaattcagcgctatcaacaggctgtgcgaagtacaatggtccttagtctgactgagctgatttccaaaatcagcttaaaaaaagcctttcaaaagtaagcaacgtctgcttactgcccctctacctgcttcggccgataaagccgacgataatactccagacgttgtagatataacggcacgctttcatcgggtattccggacggaatcgcgttacggggaggaagttttttcagatactcccggaacgcctggctacttgccatgaaatctacggctttatcgataagaagcggaacgttttcacctaatttgcccatgatgatatctccgtattaccccgcgccgggaatgcgcggccgccaattttagtttaggttcccggtaaagatgacattaaggaaaacgtgctgaatcctcaataatcatccgctgctgtttattatcttttttctatagatttcttaattaatcaacgaattgcgcagtttttgagcatgttaatgattacgttacagaactattacaatgtcattagttgtgaacaaagcacctggtcgcgcatactaggggctataaatttatctttatcagaagccatcacatgaaagaagtcgaaaaaaacgaaatcaaacgcctcagcgatcgcctggacgccatccgccaccagcaggccgatcttagcctggttgaagccgcagacaaatatgccgagctggaaaaagagaaagccacgctggaagcagaaattgctcgcctgcgtgaagttcatagccaaaaactgagtaaagaagcacagaagctgatgaagatgccattccagcgcgcaattaccaaaaaagagcaggctgatatgggcaagctgaagaaaagtgttcgcggactggtcgttgtgcacccaatgaccgcactgggccgcgaaatgggcctgcaggagatgactgggtttagtaagaccgcgttttaagaacacagtatctacagggtgattctgcacattcctataggccgagtaaggtgttcacgccgcatccggcaagataaggcgctctggatcaacaacctaagggcaattctctgatgaggattgcccttttctttaccagacatctccccccacaagaattggccctaccaattcttcgcttatctgacctctggttcacaatttcccaattaaaactcacatcaatgttgccaatacataacatttagttaaccattcattgtcattatccctacacaacacaattggcagtgccacttttacacaacgtgtgacaaggagatgagcaacagactcattacacgatgtgcgtggactccaggagacctgcaatgaatctctggcaacaaaactacgatcccgccgggaatatctggctttccagtctgatagcaagccttcccatcctgtttttcttctttgcgctgattaagctcaaactgaaaggatacgtcgccgccagctggacggtggcaatcgcccttgccgtggctttgctgttctataaaatgccggtcgctaacgcgctggccagcgtggtttatggtttcttctacgggttgtggcccatcgcgtggatcattattgcagcggtgttcgtctataagatcagcgtgaaaaccgggcagtttgacatcattcgcagctctattcttagcataacccctgaccagcgtctgcaaatgctgatcgtcggtttctgtttcggcgcgttccttgaaggagccgcaggctttggcgcaccggtagcaattaccgccgcattgctggtcggcctgggttttaaaccgctgtacgccgccgggctgtgcctgattgttaacaccgcgccagtggcatttggtgcgatgggcattccaatcctggttgccggacaggtaacaggtatcgacagctttgagattggtcagatggtggggcggcagctaccgtttatgaccattatcgtgctgttctggatcatggcgattatggacggctggcgcggtatcaaagagacgtggcctgcggtcgtggttgcgggcggcagctttgccatcgctcagtaccttagctctaacttcattgggccggagctgccggacattatctctagcctggtaagtctgctctgcctgacgctgttcctcaaacgctggcagccagtgcgtgtattccgttttggtgatttgggggcgagtcaggttgatatgacgctggcccacaccggttacactgcgggtcaggtgttacgtgcctggacaccgttcctgttcctgacagctaccgtaacactgtggagtatcccgccgtttaaagccctgttcgcaagcggtggcgcgctgtatgagtgggtgatcaatattccggtgccgtacctcgataaactggttgcccgtatgccgccagtggtcagcgaggctacagcctatgccgccgtgtttaagtttgactggttctctgccaccggcaccgccattctgtttgctgcactgctcagcattgtctggctgaagatgaaaccgtctgacgctatcagcaccttcggcagcacgctgaaagaactggctctgcccatctactccatcggtatggtgctggcattcgcctttattagcaactattccggactgagtagtacactggcgctggcactggcgcacaccggtcatgcattcaccttcttcagcccgttcctcggctggctgggggtattcctgaccgggagcgataccagttctaacgccctgttcgccgcgctgcaagccaccgcagcacaacaaattggcgtctctgatctgttgctggttgccgccaataccaccggtggcgtcaccggtaagatgatctccccgcaatctatcgctatcgcctgtgcggcggtaggcctggtgggcaaagagtctgatttgttccgctttactgtcaaacacagcctgatcttcacctgtatagtgggcgtgatcaccacgcttcaggcttatgtcttaacgtggatgattccttaatgattgttttacccagacgcctgagtgacgaggttgccgatcgtgtgcgggcgctgattgatgaaaaaaacctggaagcgggcatgaagttgcccgctgagcgccaactggcgatgcaactcggcgtaagtcgtaatagtctgcgcgaggcgctggcaaaactggtgagtgaaggcgtgctgctcagtcgacgcggcggcgggacgtttattcgctggcgtcatgacacatggagcgagcaaaacatcgtccagccgctaaaaacactgatggccgatgatccggattacagtttcgatattctggaagcccgctacgccattgaagccagcaccgcatggcatgcggcaatgcgcgccacacctggcgacaaagaaaagattcagctttgctttgaagcaacgctaagtgaagacccggatatcgccagtcaagcggacgttcgttttcatctggcgattgccgaagccagtcataacatcgtgctgctgcaaaccatgcgcggtttcttcgatgtcctgcaatccagtgtgaagcatagccgtcagcggatgtatctggtgccaccggtttttagtcaactgaccgaacaacatcaggctgtcattgacgccatttttgccggtgatgctgacggggcgcgtaaagcaatgatggcgcaccttagttttgttcacaccaccatgaaacgattcgatgaagatcaggctcgccacgcacggattacccgcctgcccggtgagcataatgagcatagcagggagaaaaacgcatgattatttccgcagccagcgattatcgcgccgcagcgcaacgcattctgccgccgttcctgttccactatatggatggtggtgcatattctgaatacacgctgcgccgcaacgtggaagatttgagtgaagtggcgctgcgccagcgtattctgaaaaacatgtccgacttaagcctggaaacgacgctgtttaatgagaaattgagcatgccggtggcactggctccggtgggtttgtgtggcatgtatgcgcgtcgtggcgaagttcaggcagccaaagcggcggacgcgcatggtattccgtttactctcagcacggtttccgtttgcccgattgaagaagtcgcgccagccatcaagcgcccaatgtggttccagctttatgtactgcgcgatcgcggctttatgcgtaacgcgctggagcgagcaaaagcagcgggttgtagcacgctggttttcaccgtggatatgccgacaccgggcgcacgctaccgtgatgcgcatagtggtatgagcggcccgaacgcggcaatgcgccgctacttgcaagcggtgacacatccgcaatgggcgtgggatgtgggcctgaacggtcgtccacatgatttaggtaatatcagtgcttatctcggcaaaccgaccggactggaagattacatcggctggctggggaataacttcgatccgtccatcagttggaaagaccttgaatggatccgcgatttctgggatggcccgatggtgatcaaagggatcctcgatccggaagatgcgcgcgatgcagtacgttttggtgctgatggaattgtggtttctaaccacggtggccgccagctggacggtgtactctcttccgcccgtgcactgcctgctattgcagatgcggtgaaaggtgatatagccattctggcggatagcggaattcgtaacgggcttgatgtcgtgcgtatgattgcgctcggtgccgacaccgtactgctgggtcgtgctttcttgtatgcgctggcaacagcgggccaggcgggtgtagctaacctgctaaatctgatcgaaaaagagatgaaagtggcgatgacgctgactggcgcgaaaagcatcagcgaaattacgcaagatagcctggtgcaggggctgggtaaagagttgcctgcggcactggctcccatggcgaaagggaatgcggcataatcgtttgcgccccctcaccctaaccctctccctcagggagaggggaccgttcggcgctgtatgtactccctcactctgaaacgacaccgcactctttttttctccctcgcccctccggggagagggccggggtgaggggaaaaggccgcactgctcaccaattttctgctatcctgcccccgcactaagggggcagtatgctaaacatcgtactttacgaaccagaaattccgccaaatactggcaacatcatccgtctttgcgctaataccggctttcgtctgcatatcatcgaaccgatgggatttgcctgggacgataagcgcctgcgccgcgcggggctggactatcacgagtttaccgccgttacgcgtcatcatgactatcgcgcgttcctcgaagcagaaaatccccagcgcctgttcgccctcaccacgaaaggtacacctgctcacagcgccgtaagctatcaggatggcgattatctgatgttcggcccggaaacacgcggcctgccagcgagcattcttgatgccctgcccgctgaacaaaaaattcgcattccgatggtgccggacagccgcagcatgaatctgtccaatgcggtgagcgtagtggtgtatgaagcctggcggcagttggggtatccgggagcggtattgagagattaattactgtaggccggatagatgattacatcgcatccggcacgatcacaggacattagatcccatccccatactcaaatgtatggttaataccgttgaaatgctggtccatatccatacttggcttatcgctgtctggtttaccgacaatacgagccggaacgccagcggcggtggtatgcggcggcaccggttgcagcaccacggaacctgcgccaatcttcgcgccgcgcccaacttcaatattgccgaggattttcgcgcccgcgccaatcatcacaccttcacgaattttcgggtgacggtcaccaccagatttacccgtaccgccaagcgtcacagattgcagaatgcttacgtcgttttcaatcaccgccgtttcaccaacgacgatgcctgtcgcgtggtcaagcatgataccgcgaccaatttttgctgccgggtgaatatcgacctggaacgtcacagaaacctggttttgcagaaagattgccagtgcgcgacgcccctgattccacaaccagtgaccgatgcgataggcctgcaaggcatgaaaacccttcaggtataacaacggggtactgtatttatcgactgccgggtcgcgggtacgcaccgcctgaatatcacaggccgcagaggcgatcatttccgggtcagcggcgtaggcttcttccaccacttcacggatagcaatagcaggcataattgggctactcagcttgttcgccagcatgtagctcagtgcactgccaaggttttcgtgcttgagtagcgtcgcgtggtaaaaactggccagcattggctcacagtccgccagcgttctggcttcggctttaatattgttccagacaatttccagttcttcacagctcattgcttactccacacgatgagataatgaccggcccgttctgcgcgggccgggtcatagcggtaacaaaggttccctggggttagtggctgctgcgctcgtccttgcgtgcacgacctagtaaagtcaatgctgcctcgcgcgcgttttttccgcaatataatacttgataaatttcctcggttattggcatttcaacgccgaagcgatgcgccagttcgcggacttctttcgtattgcggtagccttccaccacctgaccaatcttctcctgcgcgctttgtacatccatgccctgaccgagcatcatgccaaaacggcggttacggctctggttgtcggtacaggtaagcaccagatcgccaagccccgccatgcccataaaggtggcagggtcggcacccagcgccgcaccaagacggctcatttcagccagcccacgggtgatcagcgccgtacgcgcattcgcaccaaaaccgataccgtcggacatccccgcaccaatggcaataacgtttttcaccgcgccgccaagctgcacgccaatgaaatccggattgctgtaaacgcggaaacttttgccgcagtgcagcagctgctggagatcatcggcaaaggtctgatcggtgctggccaggctaatagctgtcggtaaacctgccgccagttctttcgcaaacgttgggccagagataaccgccagcggaatttgatcgcctaaggcctcacgcgccacgtcctgtaacagacgtccggtttccgcttccagccctttggtcgcccacaccagacgcgcatcaggacgcatcagtggtttaatctggcgcagcacttcaccaaagacatggctgggtacgacgacgagaatattacggctggctgccagcgcagtggcgagatcgctttcaagatggagcgtatcgggaaaaggcacatcggggagaaacgcggcgttacagcggtcgcgttcaagcgttgcgatatgttcagggtcatggccccagaggacaacctcgtggccatttcttgccagggtgatggcaagagcggtgccgtagctgccggcaccgatcacagtcatactagcattacgttggttcatcaggcatcctgatgttcttcagtaccttcgccagcctgctgctgcaaatagttcatgaacagcgcatcgaagttaaccggcgcaaggttcagttgcgggaatgtaccgcgggataccatgctggtgatgcactcacgagcatacgggaacagaatgttcgggcagtatgctcccaggcaatgcgccatctgggtgccttcgatacccgcgatggagaaaataccgccctgctgaacttcacacaggaacgcggtttcttcgcccaaagaggccgttacggtaacacgcagtaccacttcgtatacgtcatctgccagttgggaagatgccgtatccagatcaagtttaacttctggttgccaatctttctggaaaacgtgcggcgcgttcggcgcttcgaaagagatatccttggtataaatacgttggatctggaaagtcatttcagtgttgttttgttcactcatgtgtagaaaacccttaagtgttgtccttaaatactgcgcaatgtaatgccaacgttcacacgttatttcagcaggggatccagtccaccacgtgcatccaatgcatacaagtcatcacagccgccaatgtgctgtgcgtcaataaaaatctggggaaccgtggtgcgaccgctgcgtttgatcatctcttcacgcttggcggcgttgccatcgatcggcagctcctggaaactcacgcccttgctgctcagcagtgcttttgcacgatggcaatacgggcaggtttctttggtatagatttcaacattggccataaattagctcctgtttttttaccctgaaatttcatgttgcagggcggcagcaaaatggagtgtccccagaagcttataacaataagtcgctgggggcctaattgcagctaacggcctgcatcatgaaagacgacaggtaaattatttgccgcgcaccaaaggcaagttttcgccagcccagccagcgacgccttctttcagcacgaatacttgcgcaaaaccagctttcgtcagtgcgtttgcaggctcctggcactgcatgccagaaccgtctaccacgataaccggtttgtctttgtgcttctcaagctcaccaacattgttggctttgatttcgctcggcaacagattaatagaacctgcgatatggcctttacggaagtcatcacgctgacgtaaatccacaaccacagcgtcttctttgttgatcagacgcgtagcttcaccacgagtaatcaccttcactttgctggtcaggctcttaaacgtagtcacaagaaccgccaccagtaacgcgatccaggcgatactcagtatgggatgacggccaacaaattgcataatttcttgcatggggggtaacaactcccgacgtagtgattaaaaaaaccaggaaaggagtatacctgcgcggtgcggcaaatacagccagcgcgttaactggaatgcaattttgcggggcgcgacgaaaaaaaagcgtaaatctggcatcggcttgccgcgagcggtcgtatattttgatcttcagaggctattttatcgattcagctgtagtaaaattacgcaaattttgactcttgagtatgaggttgtcgcaatgttggtttctaaaaaacctatggtactggtgattctggatggctatggctatcgcgaagaacagcaggataacgccatttttagtgctaaaaccccggtaatggatgcactgtgggccaatcgtccgcataccctaatcgacgcttccggtctggaagtcggtctgcctgaccgtcagatgggtaactccgaagtaggccacgttaacctgggtgccggccgcatcgtgtatcaggacctgactcgtctggacgttgaaatcaaagatcgcgctttctttgctaatccggtgctgactggcgcggtagataaagcgaaaaacgcaggcaaagcggtacacattatgggtctgctctccgcaggcggcgtacacagccacgaagatcacatcatggcgatggtagaactggcagctgaacgcggcgcagaaaaaatctacctgcacgcattccttgacggtcgcgacactccgccgcgcagtgctgaatccagcctgaaaaaattcgaagaaaaatttgccgcgctgggcaaaggccgcgtagcgtccatcattggtcgttactacgcgatggaccgcgataaccgttgggatcgcgtagaaaaagcttatgacctgctgactctggcgcagggcgagttccaggccgataccgccgttgctggtttgcaggctgcttatgctcgcgacgaaaatgatgaattcgtgaaagcgaccgttatccgtgctgaaggtcagccagacgcggcaatggaagacggcgatgcactgattttcatgaacttccgtgctgaccgcgcgcgtgaaatcactcgtgctttcgtgaacgctgatttcgatggcttcgcgcgtaagaaagtggttaacgtcgatttcgtgatgctgaccgaatacgccgctgacatcaaaactgcggttgcttacccacccgcttccctggttaacaccttcggcgagtggatggcgaaaaacgacaaaactcagttgcgtatttccgaaaccgaaaaatatgcccacgttactttcttcttcaacggtggcgtagaagagagcttcaaaggcgaagatcgcattctgatcaacagtccgaaagtggctacctacgatctgcaaccggaaatgagctccgcagagctgaccgaaaaactggttgcggccatcaagagcggcaaatacgacaccatcatctgtaactatccgaacggcgacatggtaggtcacaccggggtgatggaagcggcggttaaagcggttgaagcgctggatcactgcgtggaagaagtcgcgaaagcggttgagtccgtgggtggacaactgctgatcaccgctgaccacggtaacgctgagcagatgcgcgatccggcaacgggtcaggcacacacggcacacaccaacctgccagttccgctgatttacgttggtgataagaacgtgaaagcggttgaaggcggcaaactttctgacatcgcgccgaccatgttgagcctgatgggtatggaaatcccgcaagagatgactggtaagccgctgttcatcgtggaataatccctccccatgaggggaaaggcgattaataccatgacacgggccgtgaaaccgcgcaggtttgcaatcaggcccatcatctacgccagcgttcttagcgctggcgtattgttgtgcgccttttccgcccacgcggatgagcgtgaccaactcaaatctattcaggctgacatcgccgcaaaagagcgcgcggtacgccaaaagcaacaacaacgcgcaagcctgctcgcacaattgaaaaagcaggaagaagcgatctctgaagccacccgtaagctgcgcgaaacgcaaaacacgctcaatcaactcaataaacagattgatgagatgaacgcgagcattgccaaactggagcagcaaaaagccgcccaggagcgcagcctcgccgcacaactggatgccgcattccgtcagggcgagcataccggtattcagctgattctcagcggtgaagaaagccagcgtggacagcgtttacaggcttatttcggctatctcaaccaggcgcgacaagaaaccattgcccagttgaagcaaacgcgtgaagaagtcgccatgcagcgtgctgaactggaagagaaacagagcgagcaacaaacgctgttatatgagcagcgcgcccaacaggcgaaactgactcaggcgctgaacgagcgtaaaaagacgctggcagggctggagtcttccatccagcaaggtcagcaacagttgagcgagctgcgcgccaacgaatcccgtctgcgtaacagcattgcccgtgcggaagccgcggcgaaagcgcgtgcagaacgagaagcacgtgaggcccaggcggttcgcgaccgccagaaagaagcgacgcgcaaaggcaccacctacaaaccgaccgaaagcgaaaaaagcctgatgtcccgtaccggtggtctgggcgcgccgcgtggtcaggcattctggccggttcgcgggccgacgctgcatcgctatggcgaacagctacagggtgaattacgctggaaaggtatggttatcggtgcttctgaaggtactgaagttaaagcgattgccgacggtcgggtgattctggctgactggctgcaaggctacggtctggtggtggtggttgagcatggtaaaggcgacatgagtctttacggctataatcagagcgcactggtgagcgttggtagccaggttcgcgcgggccagccgattgcactggtgggcagcagtggcggtcagggtcggcctagtctctatttcgaaattcgccgccagggtcaggcggtcaatccacagccgtggttgggaagataagttttgtttccatttcgtcgtaacgttcttgcatttgccgctctgttggcgctctcctcccccgtacttgctggcaaacttgccatcgtcattgatgattttgggtatcgcccgcacaacgaaaaccaggtgctggcgatgccttccgctatctccgtcgctgtattacccgatagtccgcacgccagagagatggcgaccaaagcgcataacagcgggcacgaagtgttgattcatctcccgatggcaccgttgagtaaacagccgctggagaaaaatacgctacgcccggagatgagcagcgacgaaattgagcgcattattcgtagtgcggtcaataacgtgccctatgccgtggggatcaacaaccacatgggcagcaagatgacctctaacctgtttggtatgcagaaagtgatgcaggcgctggagcgttacaatctttacttcctcgacagcgtaaccatcggtaatacccaggcgatgcgcgccgcgcaaggcactggcgtgaaggtgatcaaacggaaggtattcctcgacgatagccaaaatgaagcggacatccgtgtgcaatttaatcgcgcaattgacctggcgcgtcgcaacggtagcaccattgccattgggcatcctcaccctgcaacggtacgcgtgttgcaacagatggtttataacctgccgccagacattacgctggtgaaagccagcagcttgctgaatgaaccgcaggttgatacttctacaccgccgaaaaacgctgtgcctgatgcaccgcgtaatccgttccgtggcgtgaagctgtgcaaaccgaagaaaccgatagaacctgtttatgctaatcgcttctttgaagtattaagcgaaagcatcagccagagcacgctgatcgtttacttccagcatcagtggcaaggctggggcaaacagcccgaagcggcgaagtttaacgctagcgcaaattaattagcgcaaattaaaggcgctacgcgtaatgcgatggtggctccgcgttttgtcgcgccattgccataagcggaaagaccacagtaacgcctggtaaccgaccttcacgctgcgcacattggtaatcaggcgcttatacataccggaagtaaatatctcggcaatcatccgttggcgggtaagaatatccggctctttgcgcaccgcatggcaaacacgcaatgcctcgtaagttatttgctgatgaaattccggataaatcataattttgtcggcataatttcgatttaatttctccagcaggcgggtaatcttaatatagtgacgttgataattaaggtttttattcccttgtctatgcaaccgactcacactcgtattatgcagataatatttatataaactttgctcggtatatcgcgcacgcagcgcgttaaacatgaattctgttgtccagacaatatcctgatgatgtaatccggcaataaatttaatgttatttttaacaataacatcacggcgataaacccccatccagacaacgtgagtccaacggcggctagaaagccccatccgcagccagtccgggccggttaatacgccggtactgcgaaggcgatcggtggggatggattgccaggtttctcccgtttcacgaaaacaccagtcagcgttgcactgcgccacgtcgaggtcgtcctctaacgccatggtcatcagcgtttcgtacatggtgggatagacttcatcgtcagcatcgacaaaagcgacatatttgcccgttgccacttcaatcccacgattacgcgccacgcttgcgccagcattcgcctgatgcaacaaacgaacgtgcggatagttttctgcgtaatactttgctatttcaacagaattatccgtactaccatcgttaataataatgatttccagagcagtccaggtttgcgtaattaaagattccatacaagtgcggaaatcatcgcccgcattatataacggaataataacactaagtttattggtgctgttcatcataaattaccgacgacctctgaagttatcctgacgttttacaggctttgtattaagaaactattaagcctgtgagatattatttttacaggtgagagagtcacttcagggtagagagataatgagagcagctatataagagatcagcacaattacgaactctttattacactgacaggattttacatatttaacagattatcctcagataaaagggctggaataccagcccttgttcgtgttaatcccagctcagaataactttcccggactggccgctacgcatagcgtcaaagcccttctggaaatcatcgatagagaaacgatgggtaatgatcgggctaagatcgaggccagactgaatcagcgccgccatcttgtaccaggtttcaaacatctcacgaccgtaaatacctttaatgaacaagcctttaaagatcactttggtccagtcgatagacatatcagacggcggaatacccagcatcgcaatacggccgccgtgattcatggtgtcaagcatggtacgaaacgctggcggcgcaccggacatttccagaccgacatcaaaaccttcggtcatgcctaactccgccatcacgtcattgagattttctttggcgacgttaaccgcacgggtgatacccattttacgcgccagctcaaggcggtattcgttaacatcagtgatcaccacattgcgtgcaccaacgtgtttcgccaccgccgctgccataataccaatcgggcctgcaccagaaaccagcacatcttcgcccaccagatcaaagctcagcgcggtatgcacggcgttaccgaagggatcaaaaattgcggctaagtcatcggaaatattgtcggggattttgaaggcgttgaatgccgggatcaccagatattcggcaaagcagcccgggcgattaacaccaacgcctatcgtgttgcggcacaaatgggtacgaccaccacgacagttgcggcaatgaccacaggtgatatggccttcgccagaaacgcgatcgccgatcttgaagcctttcacttcctgaccaatacctaccacttcaccgacatattcatggcccacgaccatcggcaccgggatggttttttggctccactcatcccagttatagatgtgaacgtcagtcccgcagatggctgttttacggattttaatcagcagatcgttatgcccgagttccggtacaggaacgtcggtcatccagatgccctcttccgctttcagtttggataacgctttcatctcacatcctcaggcgataacgcccagttgtttaccaatacgcgtaaatgcttctactgcacgcgtaatttgctcaggggtatgcgccgcagacatctgggtacgaatacgcgcctgacctttcggaacgaccggatagaagaaaccggtaacgtaaatgccctctttttgcagctcacgggcaaatttctgcgccactaccgcatcaccaagcatgaccggaataatggcgtgatcggctcccgccagggtaaagcccgccgcgctcatttgctcacggaactgacgcgcgttcgcccacagacggtcacgcagttcgctgcccgcttcgaccatctccagtactttgatggacgcggcaacaatggccggtgccaggctgttggagaacaggtacggacgagaacgctggcgcagccactcaaccacttctttgcgcgccgcggtataaccaccagaagccccgcccagcgctttaccaagcgtaccggtgataatatcgacccggcccatcacatcgcagtattcatgggaaccacgaccattttcaccgacaaaaccgaccgcgtgggagtcgtctaccatcaccagggcatcatatttatctgccagatcgcaaacgcccttcaggttggcaatcacgccgtccatactgaacacaccatcggtggcgatcagcacatgacgcgcaccggcttcacgcgcttctttcagacgtgcttccagctcctgcatatcgttgttggcatagcgatagcgtttagctttgcacagacgcacaccatcaataatagacgcgtggttcagtgcgtcggagataatggcgtcttccgcacccagaagcgtttcaaacaggccaccgttagcatcaaagcaggaagagtagagaatcgcatcttccatccccaggaaggccgccagtttttgttcaagctctttatggctgtcctgagtgccgcaaataaaacgcacgctagccatgccgaaaccgtgagaatccattcccgcctttgccgccgcaatcagatcaggatgattcgccagcccgagatagttgttggcacaaaagttaatgacgtggcttccatcagccacagtgatatctgcttgctgcgcagacgtaataatgcgctcttctttaaacaacccttccgcccgtgcggtttccagatcgttggttaactgctgataaaattctccacgcattgcgattctccagacagggcaaattccagcacatattacccaaacttataggtcgcgacgagataacgcgttaacacttctgcaaaattcaggataaataacgtgtaacttgatgtctctcaacacctacagatagtagaaaaactgtacagttttggctgggcataatgatgattgattttactgcattgatataaaaagaaaaaatgatgccaaagcatcatttttcctatctcagttggtatcaaaacgctacccactaatggagggaaacttattttctactaaggaaaattctcagcgcctgcatttttgcccctaaagtgttactcctgaagcagcgaaacaaatcgaaccattttcctctccccagatagtttaggttgaagagatcggggcgtttgtaatagcacatgacaaaaatgccctggtcatcgtccacaatgttattatttagtgttattttttgactttccagaactaatttatagaattctttccatttatgctgactaccaacaattgcgcccccaataatatatacatgattgccaatcatgaaatcaaaaacctgttgttgagatgtgacagtaagccctttttttatagtgaaaagatgcatcttactttcatcaaatgggaaatcccaaattttcaatcctcgagttacatttggcttatggcaatagccaaaatctatccacgcaacaagaggcgttttcactaagcccatgttgatagctttatttacaaaataggccttaaggttacataccaaaacatactctggactccagtactctgggttttttaattgtcgaggctcaagtctatttgtaaagctctcatctttttgaattttttcgatacgacttctgatatatctaaatttcttttttatatcgataacgataaccgttgttggttttccgttgcgaatcgcttcaacccttggtttcaaatcgggagaagtgaaaataatcatctcattttcaagtgcggccagacgctcaaagtaactaaaataaacatcaacactacgagctagtttttcacggaaccctttattagcagtccaatcccctctaccaatgtcaaaatatgcagtgataattgtggtggaacttttcattactaataagaccattaatataaaaaaagaattatatcataaatattaatagaatgtatactgtatattatccattcaaatgcttccgttatttatcatacatcggaatattgatactaaagcactattcacatgcaaaaccaacatccgccatgaaggactagctaaaacccaaactagtttgttgcaattagcatccttgcacctctatgtaaagggctgaagggattcggatgtgatggtatgattacagacattcgtgtctgagattgtctctgactccataattcgaaggttacagttatgatcatcgttaccggcggcgcgggctttatcggcagcaacatcgttaaagccctgaatgataaaggcatcaccgatattctggtggtggacaacctgaaagacggcaccaagtttgtgaacctggtggatctgaatatcgcagactatatggataaggaagacttcctgatccagattatggctggcgaagagttcggcgatgtcgaagcgattttccacgaaggcgcgtgctcttccaccaccgagtgggacggcaagtatatgatggataacaactatcaatactccaaggagctgctgcactactgcctggagcgtgaaatcccgttcctgtacgcttcttccgcagccacctacggcggacgcacctccgactttattgaatcccgcgagtacgaaaaaccgttgaacgtctacggttacagtaaattcctgtttgatgaatatgttcgtcaaatcctgcctgaagcgaacagccagattgttggcttccgttatttcaacgtttatggaccgcgtgaaggccataaaggcagcatggcgagcgtcgctttccatctcaacacccagcttaacaacggtgaaagtccgaagctgtttgaaggtagcgagaacttcaaacgcgacttcgtctatgtgggcgacgtggctgatgtgaatctgtggttcctggaaaatggcgtttccggcatcttcaatctcggtactggtcgtgcggaatccttccaggcggtagctgatgctacgctggcttatcacaagaaaggccagatcgaatacattccgttcccggataaactgaaaggccgctatcaggcgttcactcaggcagatctgacaaatctgcgcgcggcgggttacgacaaaccgttcaaaaccgttgctgaaggtgtaacggaatacatggcctggctgaatcgcgacgcataagagctctgcatgaaaatactggtgatcggcccgtcttgggttggcgacatgatgatgagccaaagtctctatcgcacgctccaggcgcgctatccccaggcgataatcgatgtgatggcaccggcatggtgccgtccattattaagccggatgccggaagttaacgaagctattcctatgcctctcggtcacggagcgctggaaatcggcgaacgccgcaaactgggtcatagcctgcgtgaaaagcgctacgaccgcgcctacgtcttacccaactccttcaaatctgcattagtgcctttcttcgcgggtattcctcatcgcaccggctggcgcggcgagatgcgctacggtttactcaacgatgtacgcgtgctcgataaagaagcctggccgctaatggtggaacgctatatagcgctggcctatgacaaaggcattatgcgcacagcacaagatctgccgcagccattgttatggccgcagttgcaggtgagcgaaggtgaaaaaagttatacctgtaatcaatttagccttagtagtgaacgtccgatgattggtttttgcccgggtgcggagtttggtccggcaaaacgctggccacactaccactatgcggagctggcaaagcagctgattgatgaaggttatcaggtggttctgtttggcagcgcgaaagatcatgaagcgggcaatgagattcttgccgctttgaataccgagcagcaggcatggtgtcggaacctggcgggggaaacacagcttgatcaagcggttatcctgattgcagcctgtaaagccattgtcactaacgattctggcctgatgcatgttgcggcggcgctcaatcgtccgctggttgccctgtatggtccgagtagcccggacttcacaccgccgctatcccataaagcgcgcgtgatccgtttgattaccggctatcacaaagtgcgtaaaggtgacgctgcggagggttatcaccagagcttaatcgacattactccccagcgcgtactggaagaactcaacgcgctattgttacaagaggaagcctgacggatgcgggttttgatcgttaaaacaagcagcatgggcgatgttctccatacgttgcccgcactcactgatgcccagcaggcaatcccagggattaagtttgactgggtggtggaagaagggttcgcacagattccttcctggcacgctgccgttgagcgagttattcctgtggcaatacgtcgctggcgtaaagcctggttcagcgcccccataaaagcggaacgcaaagcgtttcgtgaagcgctacaagcagagaactatgacgcagttatcgacgctcaggggctggtaaaaagcgcggcgctggtgacgcgtctggcgcatggcgtaaagcatggcatggactggcaaaccgctcgcgaacctttagccagcctgttttacaatcgtaagcatcatattgcaaaacagcagcacgccgtagaacgcacccgcgaactgtttgccaaaagtttgggctatagcaaaccgcaaacccagggcgattatgctatcgcacagcattttctgacgaacctgcctacagatgctggcgaatatgccgtatttcttcatgcgacgacccgtgatgataaacactggccggaagaacactggcgagaattgattggtttactggctgatagtggaatacggattaaacttccgtggggcgcgccgcatgaggaagaacgggcgaaacgactggcggaaggatttgcttatgttgaagtattgccgaagatgagtctggaaggcgttgcccgcgtgctggccggggctaaatttgtagtgagcgtggatacggggttaagccatttaacggcggcactggatagacccaatatcacggtttatggaccaaccgatccgggattaattggtgggtatgggaagaatcagatggtatgtagggctccaagagaaaatttaattaacctcaacagtcaagcagttttggaaaagttaagtagtttataaaggtaaaacatgctaacatcctttaaacttcatagtttgaaaccttacactctgaaaagtagtatgattttagagataataacttatatattatgtttttttagtatgataattgcattcgtcgataatactttcagcataaaaatatataatatcactgctatagtttgcttattgagtctaattttacgtggcagacaagaaaattataatataaaaaaccttattcttcccctttctatatttttaataggcttgcttgatttaatttggtattctgcgtttaaagtagataatagcccatttcgtgctacttaccatagttatttaaatactgccaaaatatttatatttggttcttttattgttttcttgacactaactagccagctaaaaagtaaaaaagagagtgtattatacactttgtattctctgagttttctaattgctggatatgcaatgtatattaatagcattcatgaaaatgaccgcatttcttttggtgtaggaacggcaacaggagcagcatatagtacaatgctaatagggatagttagtggcgttgcgattctttatactaagaaaaatcatccttttttatttttattaaatagttgcgcggtactttatgttctggcgctaacacaaaccagagcaaccctactcctgttccctataatttgtgttgctgcattaatagcttattataataaaagtcccaagaaattcacttcctctattgttctactaattgctatattagctagcattgttattatatttaataaaccaatacagaatcgctataatgaagcattaaatgacttaaacagttataccaatgctaatagtgttacttccctaggtgcaagactggcaatgtacgaaattggtttaaatatattcataaagagtccttttagttttagaagtgcagagagtcgcgctgaaagtatgaatttgttagttgcagaacacaataggctaagaggggcattggagttttctaacgtacatctacataatgagataattgaagcagggagtctgaaaggtctgatgggaattttttccacacttttcctctattttagtctattttatatagcatataaaaaacgagctttgggtttgttgatattaacgcttggcattgtggggattggactcagtgatgtgatcatatgggcacgcagcattccaattatcattatatccgctatagtcctcttactcgtcattaataatcgtaacaatacaattaattaagaataaacaagtttaagaagtgagttaaaactcacttcttatctatacaacttaatctctttacactattagttaaagtttcagtatcgatatcttttaccgtatatgttggggatactatttgtatagatttatgatgattcggggaccaaattaaatggctgggatattccggagtacgactattagggtaaaatgcaagcgttggtttatgataagccgcagcgatatgaacaagagctgtatcaacagaaatgacaaaatcactatacttggtcaacgcaacggtataaataaactcatcaaatggtagtgtttcgatttcaagtattggtattgtcaataaatcttgcggtaacccggtaaatataatccgataattttcaaagtgtgttttcacttcttgatatataacttttatttgctcaaacgtaagacggcatattttttttgcacctaatggattaataatgactattcttgtatctccaataaattcttttattttatcttcaacatctactggtaaatgcaagtcgtagttggtggaaaatttaccctcaccataaatatgcttcagtatttctattgctcgtgtactcatatgttcttttaaacattcatcgtggggatggtaaaaactatagtaacgcttataccaatgatcaaaacccagaatgtaagaatcttttaaactacttaatattaagctatgcttaaaactgggcatagtttcaaaggggtctaatacaatatcgaactgtaaatcccgcagatgcttacatagagtaagcatttcaagaaaaccggtactttctttaatacagaactcaaatatatttttattattagagagaaattccccaccctttctatttgtgagaagagttattttaacccctttactataaagttcacgataaatgctacttaatacaattagatcaccaagtttattattatcatgaataataaggcaacttttaacttgtgctggatctgtaatttgattatttattttattacgaaataaaaaagaaaggaaattaatcttgattttgtttatataaaatcttttctttttgtgaaaagttcctaagcgcatttttataccatattattttagtttcaggatgattaattagcataagaatcggtactagttctatattgcattttttttcttgtcatatctttactttcttctgcactgatgtcttgaagtttaataaatggaattacatcgtaagaaatagctgtatcatcacttaaattataaatattaatatcttttacattatcatgcataaaacgaaaaaatggcaatattttgaataaatccctacttaattcgctgggcatgggatttttattctcatcatagaaacgagaacagctacccgttaaatcaagaccagaacaaataatccgcgcatacttaagactatatgcgatttgaattgcagcaaaggcaatagtatggcaactgcaataaccaagactaatgtccttgcaaaatccaaccagacgaccttttttagacaacggtacagagatcagcagttctttgtgaatctgtctcaaaatattaaatttaatcttctttataaaaccacctttttcccgacggtaaaaggaccgtaatacgaggcagttctggaggatataaagtttatcttctttggaagcgtgttcataaacgtcaacgtttactatggtataacgacttctctggctaaatttataaaaatcatcacgacgctgatgtaaaaatcggacatctgtaagtacatatataaaaggaacgatattattacttaacagatattgcgcagaaccattgacagcaataatatcctttgttcgtaatacactcaaaggtgttttttggcttgtagggccgctaagaaaaataataacatcatcagatattttattttcaatcaggttttcaacatcttttttgtcaatgtatctaatattcttcatgataaacctgtgaaataaataactccgcttaaaactgtcctggtgaagacatgtaattgtgggattttttttagcgcgctggtttccctttcaaacgccgcataaaattgcgcatttttttacgatatactaaaagataatagcctagatctctaatctcatttttaataccgtaatgacgctctaagtcaatacgatctttcgctttacgctgcgcactagcacgctttccggagagatcgataattcgaacctcaccattttttataatgaagttaccacgatgggggtcgccagaaaccatgccatgttgatgtaaggcattaatactttgctgaattttattttttagcgcatcatcaatatcgggcatatcacacaactctatgccatcaatatactcgatgatcatgatataagtatggacaaaacgtaaggttttccgttcagccaataaataaaagtcattgagtgtatttaacccttcatttcgtactttttgggtttgctcaaaaaggcgttcgtaataatcaccttttaacagagacttaaagaaacgttcgttacgcttaactttcggagaaaaaaccttaagaatcaatttaccgtaatcggtatcaataagcataacttttgtatcatcaatagaacgaaaaaccttgatgatatttatattataagacaagaagtcatttaatacattgaggtacttactattgttttcatcggtaaaaacaaccaagtctttgatcttgctcttctgaatcataataaaccagttaaatgttatttacggtaatattttcggcaaagataacagactcctgctataattcctgagatataatgatgttgcactaaaagatgtttatatcttttttaaattcaataattgatttcgcatctcgtggagagtcatctttccagggggaattttctaaagctattttatagtattttaccgatggataaattgcccatttgtgccacggtttagttgcacctgtataatgaataagaagagtactttctgtaatcagctttttatagttttgatgtgttttgtcttttaattcacttttaattgtataaattgtattgtactcacgaggcaaaaataatgtcatccctttcagtaagacattcataacatcctgatcagggtatttataaacattatctttactcataagaatagacaacgctttttctgttagttttgcgtcagcccattttcttaagtctaaataaacgacaccggaattaaagtactgcccaagtaattcaggatcagacaacctggataccgccttttcttgcattggctcaacatctttaacaacagcagcaaccgctccatttaaacccagatgtaatagttggctaatatcgcctttacaaacaacatctgcatcaagataaagcaaacgatcaagcgttaaacccaataattgaaatgcaaataaacggaagtacattgctcttgaccagacctgtgtacaaggcaagcactggagcttatcagtgttaattctatataacgtgattcttaattggttttgctctgcaagctttgcaattttttgaaaaaaaccatcattataaacatcagcaataatataaaaatcaagattaatatgtcgattatttaggacaattgatgtgatggaaacacctacaccatcaagataattagcatcgacaccataggcaacatttaaacattcagaagtatttatattagctagccgaaaatcccaggctttaactttatctatctctatggcaggaaatgagtccacaatgctacccttatatcattactttatagtttcccagttttaatgctttatcttttcaataaaataaaaaagatagttgctaaatccttttagatatctatgctttttaagcatatgttttgcgctatatcttaattgattgctattgttcggtttcagcaacgccgtattcttccatgggctagcattttttgcctccataaaggcttgacttacaggataatcccaggcccaatcatgccagggcttggttggcccgatataatggataaaaatagtatcgttggttactgggtttataaagctttctttgagttgataatttaagctgaactgggtgttatatttaatatcagcgaaaataagtttatccgccagcaacatatttaacacatcctgatcaggatgtgttatttttttgattatttctggctcatttagcattgcaatagctcgtgcagaaacctgctgagccgcccattgggcagtattaatcaataaaaaaccggagttaaagtaacctttagcaattcccgcaacacctaagctatgggcgcgtttttcccaccagtcagcttgcccttctgtaacaaccattgcgactttatcgtcaggaaaactgaaattaattagtggctcaatagtcccctgacaaatgatatctgcatccagataaaggactttaggcgccttattaataaagtaatctgcaataacaaaacgaaaatatattgcatgagtccaattcttagtgctaggcaaactgcgcagtcgatcaccattaatcagatatattttaattctggttttatactgcaacgccagggcatcaaaatacttacgatcatcatcaccaaaataatcagtaaaaatatggaaacacaatcgacttccttcattatattttaatatactagcaatgctaattccgcaaccaaatagaaagtttttgtcagttccataagcgatgtccagacaaagattttctgtttctactttatgatcataatcaataacactattaagaaactcagtttcctggaaaaacacctgctgcattatttcctccgggaaatagcagaaataattaccttatgtaatctatcgtaatacttgctttggtaaaattcatcgatgctcgcaggaattttttcatgttcgatatgaatttcacctgctatatatttatttagaagagttacaaaaccagcaatatctcccggttgatacagatggccattgacatcaggttgaataatgtcagcaggcccggagacacaatcggcactgatacaaggaatcccccagctcaaggcttcaagtagggtcattgggaaaccttcaaaagaactcgtgagcaataacgcactcactttttcaatatcttgctggaccaattcccagggatattgttgccaaccataccagacaattcgatcatcaatatttaattctctaccataagcctggcatttttcgaaatcggagccatcacccaatacatggagtttccagttacctttcgcttgacttaagccatcaagcaggtctttaactcttttctggccttcaaatttcatacgcccaacataaataaacgttgccgtttcaccttcctcgggcgcgggaatgacactgtctttagtttcgacgggattaaaaataacatttatcgtgctttctgctacacctcgattaatcatttgctgtttaatgccagagctgattgctaaatgatagtcggcacaggtgatatattcagcatgttttttgtgatctaaagaaaaatgtggccaactaaatactggcatatcaattccactttttttacgtgcttttgcggcaaacaggcaggagatcacatcaatacaaataacgatatctggttggtactcctgaagccatttacttagagcatgaatatgtttcgcccgacgcaaaaaacctaaacgaatattggaaaaactacaactgtatttaataccttccagccatcccttatccattttgtcattacgacaaaagaaaaacatttcactttggatatgttgttgcctgaaggtagtaataacatcacggatgacagtttccatgccgccaaatccagaaacagcttcgccgataaacgctattttcatagaaactctcattaattgagtaaaactcactgttttaacggttttatttgtctataaaatcagaaacaatcgtactcatcattttatctggactgaatttatataaactatcataatccattggtttaacagaactgttaataaaatactctaacttatcccaatcatcatgacctattataaaaaagcgagattcactatagatttcactaccaaatacatttatattattagtaattaattttttattgaaaaatagtgcctcaagtatacgaagagtccagccagattggttttctttggttatatcaacaattatattagcatttaatgttcttctaatattctcttcataagatatttgtttttcaatcaaatacttactagtcgtagaacttgtcttatctttgacaacattaaaatctagcttacatcctagtgttgttaatctctcggctaactcattaattatttgaagacgccctttatcacgaccaaggaaaaaacatattggctggctgttatttttgtcagataaactataatttctaatttcatccattcctataggaaaaaattgttctattgccttgatcttttcattccctataaatctatgctcaaaatcatatataatatcgaaataattcgcgttatcaagaataaaatcttcgccaacagtatttcttagaagcaaaactttatgacagttaatattttttaatatttgtttattgatacctttattaacaacactgtcattaatgataattatgtcatcttttttaatatcattgaggtaatgcttgatgaataatcgccccagccatgcattatccatccctattttacttatttttttattaatccagttatatttttttggtgttgttatattttttatcttgtacttttttttcaggtactgaatcatttttaattcataatctgcaacccaatttataaaataaatagtcataataaagttagttccagtacatactaataaatatttttataatcctttgcgttgtgttcgctctttaatacgctcggccttaacgcttgccatgttcaataaattctgttcaagagacaatattttgcgtaaaggcatcccaaaataaaccttcataaatcgccagatatctctttgcgtcaggccaatattcatactactgaaatataaaccaatcaggtctttatcgcgccagcggcgcggtacttttgcacgtatctgtgcccgatgcagatcgataacactaatttttaattcatcttcccggccagtaaatggcaaatgaagcaaaaagtggcaaatgtaacagtcgcggtgatttatccctgcagtatgcattttacgcaccatagttgctacacgtgcgatcagcatacgcttaacacgtatatcaggcgggttgactgcccaatcggcacaataatcttcaaggctaattgtgggagtgagatcttcggtaataataaaacttgcgcgagttaatggatttaaccctttttcgccaaacccaatgcccttcattgtatcaacgccaacatcactcaggcgatgaatagcgtgccactctctgtctgcgcccaaaacgggcatccgcaaactgagtagattttttataatctcttttaatgtcgtccccttgtgccatttaagaaaatagcttttcccggacagttcaaagcgtaatgtacgacgagtctccagttcacgaaagacctcgccgttcagttttttgacctctgcaaaagcatctttaccacgccaaagtgtggcaagcggctcttttaattcaaccatctaaaccacctgtaatgatatccgcggctttttctggcaagctatacaaatcctgagtatcggcataatggcgagcattctccgcccaggccattcgcaatgggctctgagttaacgctttacgtaaaacttcatttaattgttcctgagagaaaggttcagcgatgaccgttccacaattggcatccgcaatataatgcgcgtacccacataccgctgttgttaaaacaggtaacccagcagtgatcgcttctagaagaacgatacccgcggcttcctgataagcgggatgcagtaataaatcagcggctgccattaattcactcacatcattgcgaccgaagaagaaatgcacattgctccgcacgccgagtttttctgccagcgcttcaaattttcgcggcttatcctgaccaacaacaaataaaagcgtattgtgacgtaaactttccggtaagcttgccaaagcttcaatactgcgatctacacctttacggccaaaatcacttccaacctgcagtaataagttttgttgctcttttatgccatttttctggcgataaatttcacggctgtttgggatttgctcactgtattttctgtccggataaataccgggaggaagaatttgaaaacgttcaggttcagtttgataatgcttctggaaatcggcgatttgcttatcggtcagcatcataagtttcgtgcttttaccctgctcgaaagtcgctcgctcaaatgcggcataatggcgatatcgacttgttaaacgatataaaaaacctttttcttgcgcaactttctcggcgtaacaaacatcagcggcaaaataaacatccaggccaggcatcttattaaacccaacaacgcgatctgcgggatgctctttgagatgattttgtacccaggcataatattctgcattgcgtccatggttggtatgggacttaactggcacctgaataagctcaaatgctttcgggcaatcgccttcccagctctgtgtatatacccgaacatggtggccccgtgcggcaactgtacttgcaatgcgcataaagtcacgttgaagcccaccaaatggaaaatatttatataaacaaaacgccacgatcataattgtgcattcctgtcagcactaggggcatcttctggcaacagcttttccgtagcggcgatcacatcctccgctgggataacagaaagatattttttgttgcggtcaagttcatgccgggtcggcattttctgataattccccgcccagaattgaataatattctcggtccagggacgccagaatacgtgatccgttgcaccaaatagactaatgactggcgttttcactgccgctgcaatatgtcccggcgcagaatccacaccaataaaaagcactgcatgatcaattaatgcacccagttcaggaaaacgtgttttacctgcaaggccagtaatgggttttgtttcgcaacctcgtgcaatctcatctacacaagcgagatcatctgcgctgggcccacaggttagcacaacctgatagcctcgctgttgcagcgcatcgataaccttagaaaatttatcgttatcccaacacttaaatatctgacgcgctgtcggttggatgacaacataatgatcttttacgcccagggcatctaattcccggcgcatcttcttccagcaatcttcggcgtaactcattgttgtgtcggtgtagaaatcggtaatacctaatggctcaaggacgcttaaattacgctcaacaatatgtgtaccgtgtattggcgctaagtgtgtgaagctttttttccaaataccatgctgccgatgaccataaagttggcttattttcatccgtgcaggtaaacaacgtaccagcagcgccaccatccactgatccgtaagattaatgaccaggtcataattattcgcacgcagagtttttatcaagctaagcacatttttaattttatcgaaagttcccgcacctttattgcttatcccatagagcgcattaatttccgggttttcagacaaaatagggatggtgtcctgataaagcagcatatcgatttttgcatcaggataattctgcttgagcgtactgatgacaggagtagttaataacatatccccatgatatcgcatctttatgaccaggatttttcgaaatggcttttccactagcgactcttttgtgtgattgtctggttaagttaagcagaaaaaagcacgctaccgccccaggctcaacagctacctgaatactgataacgcacttactttgacgtgctagtgtatcatttctttcgcagcaatccgacccgaatgatttttatacacaaaatatactttaatcataaaaatcaaatagataaaaaatagcatttcgataatgtcagtacggcctatgtagatttgaaaatggggccgagtttcaatgaatcgcataaaaatacaaaaaaaatgaagatgtagcggcagatcagaccaaactgaagctatttaagtcaaaaacgggaaaagtaatggtaaagccacagctaaatacatagaatccccagcacatccataagtcagctatttactatgctcgaattgctttacaccgcccttctctaccttattcagccgctgatctggatacggctctgggtgcgcggacgtaaggctccggcctatcgaaaacgctggggtgaacgttacggtttttaccgccatccgctaaaaccaggcggcattatgctgcactccgtctccgtcggtgaaactctggcggcaatcccgttggtgcgcgcgctgcgtcatcgttatcctgatttaccgattaccgtaacaaccatgacgccaaccggtagcgagcgcgtacaaagcgctttcgggaaggatgttcagcacgtttatctgccgtatgatctgcccgatgcactcaaccgtttcctgaataaagtcgaccctaaactggtgttgattatggaaaccgaactatggcctaacctgattgcggcgctacataaacgtaaaattccgctggtgatcgctaacgcgcgactctctgcccgcagcgccgcaggttatgccaaactgggtaaattcgtccgtcgcttgctgcgtcgtattacgctgattgctgcgcaaaatgaagaagatggtgcacgttttgtggcgctgggcgcaaaaaataatcaggtgaccgttaccggtagcctgaaattcgatatttctgtaacgccgcagttggctgctaaagccgtgacgctgcgccgccagtgggcaccacaccgcccggtatggattgccaccagcactcacgaaggcgaagagagtgtggtgatcgccgcacatcaggcattgttacagcaattcccgaatttattgctcatcctggtaccccgtcatccggaacgcttcccggatgcgattaaccttgtccgccaggctggactaagctatatcacacgctctagtggggaagtcccctccaccagcacgcaggttgtggttggcgatacgatgggcgagttgatgttactgtatggcattgccgatctcgcctttgttggcggtagtctggttgaacgtggtgggcataatccgctggaagctgccgcacacgctattccggtattgatggggccgcatacttttaactttaaagacatttgcgcgcggctggagcaggcaagcgggctgattaccgttaccgatgccactacgcttgcaaaagaggtttcctctttactcaccgacgccgattaccgtagtttctatggccgtcatgccgttgaagtactgtatcaaaaccagggcgcgctacagcgtctgcttcaactgctggaaccttacctgccaccgaaaacgcattgaggttgttatgcaaaaacgggcgatttatccgggtactttcgatcccattaccaatggtcatatcgatatcgtgacgcgcgccacgcagatgttcgatcacgttattctggcgattgccgccagccccagtaaaaaaccgatgtttaccctggaagagcgtgtggcactggcacagcaggcaaccgcgcatctggggaacgtggaagtggtcgggtttagtgatttaatggcgaacttcgcccgtaatcaacacgctacggtgctgattcgtggcctgcgtgcggtggcagattttgaatatgaaatgcagctggcgcatatgaatcgccacttaatgccggaactggaaagtgtgtttctgatgccgagcaaagagtggagctttatctctagtagcttggtgaaagaggtggcgcgccatcagggcgatgtcacccatttcctgccggagaatgtccatcaggcgctgatggcgaagttagcgtaacgtttatgccggatggtatgccatccggcgcgcatgaattacttctggcactgccgacaataaaacgttgcccgctgcgcatgtttagtcgccacaatcggcgtaccgcacacccgacacggctcaccttttcgcccgtaaacctgcaattcctgagcgaaatagcccggtttaccatcactttgcagaaaatctttcagcgttgtaccaccctgctcaatgctacgcagcaacaccgctttaatcacccgagctaacaattcacactctgccaggctcagactactcgccagccgatccggatggatccccgccgcaaacagactttcgctggcatagatattccctacccctaccaccagcttgttatccatcagccacggtttaatcgccgtttttttcttcgcgcacttctgatgcagatactcaccattgaaatcgtcgctaagcggctccggtccaagatgggtcagcacattatgcccttccagctctttggtccacagccaggcaccaaagcggcgcggatcggtgtagcgcagcactttgccgttgctcatcaccaaatccacatggtcatgcttttcagggggaagttcttctggaaggatgcgcaggctgccagacatccctaaatgaatgataatccagccctcaggcagctccagcagcagatatttagcccgccgctgcacgctaagcactggttggtcgcttaaacggtagatctcttcactaaccggccagcgcaagcgtccgttgcgcaccactgcatgaagaatggttgcaccaacgagatgcggttctatgccgcggcggctggtttcaacttcgggtaattcaggcatagcatctccaggaatgaacagatgcagtcaatatgggggcaagcagataacaaaaaaccccgccggagcgaggttttttgttacatcaaagcgagaattatttgattttcgcttctttgtagatcacgtgctggcgaacaactggatcgaattttttcagttccagtttttccggcttagtacgtttgttcttcgtagtggtatagaagtgaccagtaccagcagaagaaaccagcttgattttctcacgaatacctttagccatgatttatttcctctaagtacttagtacttttcgccacgggcacgcagttcagccagaactgtatcgatgccttttttatcgattacacgcatacctttagcagatacgcgcagggtgacaaaacgcttctcgctctcaacccagaaacggtgagagtgcaggttcggcaggaaacggcgtttagtcgcgttcagtgcgtgggaacggttgttaccggtcaccggacgcttgccagtaacttggcagactcgggacatgtctattctccaaaaatcaaattagctcgagcttcgtatggggtattggcgcctcgtcaggctttacagcccggtcatcgcagttctatgtgaactctcgattgccaggcccaaatgccaaacccgagattctcaaaggtggcgtagtatacgctgactcagcgatgtgctcaagtcccgaacagacaaagatcccgaaggatcgcgcatagcgggttaaatccagccgcgttcggcaaaagaaacatactctccacgcccaatcacgatatggtcgagcacgcgtaaatccatgaactgacaactctttattatccgttcagtaatgagtttatccgctttactgggttcagcacaaccgctagggtgattatgtgcaaggatcagcgcgctggcgtttatttttatcgcttcgcggataatttcccgaggatggacttcaacatggtttagcgtgccggaaaaaagacgcctatgcgttataacccggtgttgggagtcgagaaagatcaccataaagatctcccgctcctcacccgtgagctggctttgtaaaaattccctcgtcatctccgggctgagtaaagggctttcttcacgcatccgcacgttgtagtaacgccgcgccagttcagcaatcccctttaactgggcaaatttcgccacgccaattccatgaacgccactaaattgttcatattcagaggttaacaagccataaagagagccgaaattctccagcatctcttttgccagggttaatacatctttaccgcgcgttccggtacgcagaaatagcgccagcagctcgacatccgttaaggcgctaataccaaacttcagcattttttcgcgcggcatcaacagctgactattgtttttcaccttcacctcctttgtggtgctcgcatcctgtcatagccgtttcgttaaatcgacggccagttttcaatcctggaaagcgcctcgcaaagtgaatctcaggtgaaggcacgacaacaaaagtattgtgataaaatcgccaacttctggtgtcaccctacaggaaaaatcatcatgagcctggccggtaaaaaaatcgttctcggcgttagcggcggtattgctgcctataaaacccctgaactggtgcgtcgtttgcgcgatcgcggggccgacgtccgcgtagccatgaccgaagcggcaaaagcctttatcaccccacttagcttgcaggcggtttctggttatcccgtttccgacagtctgctggacccggcagccgaagccgctatgggccatattgagctgggtaaatgggctgatttagtgattctcgcccctgccacggcagatttgattgcccgtgttgctgccggaatggcgaatgacctggtaagcacgatttgtctggctacacctgcgcctgtagccgtgctccccgccatgaaccagcagatgtaccgtgccgctgccacgcagcataatttagaggtgcttgcttcccgtggtttgctcatctgggggccagacagtggcagtcaggcttgtggtgatatcggtcctgggcgaatgctcgatccgttaaccattgtggatatggcggtagcgcattttagccccgtcaacgacctgaaacatctgaacattatgattaccgccggcccgacgcgtgaaccgctcgatccggtgcgttatatctctaatcacagctccggcaagatgggttttgctatcgccgccgccgctgcccgtcgtggcgcgaacgtcacgctggtaagtggtccggttagtctaccgacgccaccgtttgttaaacgtgttgatgtgatgaccgcgctggaaatggaagccgccgtgaatgcttctgtacagcagcaaaatatttttatcggctgcgccgccgtggcggattatcgcgcagctaccgtggccccagagaaaatcaaaaagcaggccacgcagggtgatgaattaacaataaaaatggttaaaaaccccgatatcgtcgcaggcgttgccgcactaaaagaccatcgaccctacgtcgttggatttgccgccgaaacaaataatgtggaagaatacgcccggcaaaaacgtatccgtaaaaaccttgatctgatctgcgcgaacgatgtttcccagccaactcaaggatttaacagcgacaacaacgcattacaccttttctggcaggacggagataaagtcttaccgcttgagcgcaaagagctccttggccaattattactcgacgagatcgtgacccgttatgatgaaaaaaatcgacgttaagattctggacccgcgcgttgggaaggaatttccgctcccgacttatgccacctctggctctgccggacttgacctgcgtgcctgtctcaacgacgccgtagaactggctccgggtgacactacgctggttccgaccgggctggcgattcatattgccgatcctagtctggcggcaatgatgctgccgcgctccggattgggacataagcacggtatcgtgcttggtaacctggtaggattgatcgattctgactatcagggccagttgatgatttccgtgtggaaccgtggtcaggacagcttcaccattcaacctggcgaacgcatcgcccagatgatttttgttccggtagtacaggctgaatttaatctggtggaagatttcgacgccaccgaccgcggtgaaggcggctttggtcactctggtcgtcagtaacacatacgcatccgaataacgtcataacatagccgcaaacatttcgtttgcggtcatagcgtgggtgccgcctggcaagtgcttattttcaggggtattttgtaacatggcagaaaaacaaactgcgaaaaggaaccgtcgcgaggaaatacttcagtctctggcgctgatgctggaatccagcgatggaagccaacgtatcacgacggcaaaactggccgcctctgtcggcgtttccgaagcggcactgtatcgccacttccccagtaagacccgcatgttcgatagcctgattgagtttatcgaagatagcctgattactcgcatcaacctgattctgaaagatgagaaagacaccacagcgcgcctgcgtctgattgtgttgctgcttctcggttttggtgagcgtaatcctggcctgacccgcatcctcactggtcatgcgctaatgtttgaacaggatcgcctgcaagggcgcatcaaccagctgttcgagcgtattgaagcgcagctgcgccaggtattgcgtgaaaagagaatgcgtgagggtgaaggttacaccaccgatgaaaccctgctggcaagccagatcctggccttctgtgaaggtatgctgagtcgttttgtccgcagcgaatttaaataccgcccgacggatgattttgacgcccgctggccgctaattgcggcacagttgcagtaatatgacgccggatgacttttcatccggcgagtttctttaaacgccaaactcttcgcgataggccttaaccgccgccagatgttccgccatttccggcttctcttccaggtaagcaatcaggtctttcagggtgatgatagagatcactttgcagttgtaatcacgctcaacttcctgaatcgcgctaatctcgccgcgcccgcgttcctgacgatcgaggctaatcaacacgccagcaagcgtcgcgccattggcctgaataatctccatgctctcgcgaatcgccgttccggcggtgatcacatcatctaccagcattacgcgtccttgtaacgcgctaccaaccagattgccgccttcaccgtggtcttttgcttctttgcggttaaagcagtacggcaggtccaggtcgtgatgctccgccagtgccacagcggttgtggtggcaatcgggatccctttgtaagcagggccaaacagcagatcgaactcaatgccggaatccaccaacgcttcagcgtaaaaacggcctaacagtgccagatcgcgcccggtattaaacagcccggcgttgaagaaataggggcttttgcgcccggatttcagcgtaaactcgccaaactttaacacctgcttgctaagcgcaaattcaataaactggcgctgatatggtttcatgccttcgctcctcatcttacttttctacagacaaaaaaaaggcgactcatcagtcgccttaaaaatcagtttgccagcgccgccttctgcgtcgttacaatggattgctttcccctcgggccagagccaacaagatgagtagctcttcatgggtgaacggctcgccttctgccgtcccctgcacttcaatgatgcgcccgtcttcggtcatcactacgttcatgtcggtctctgcggcagagtcttcaacgtattccagatcgcaaaccgcttcgccgttcacaattccgacagaaactgcggctaccatccctttcatcggattggttttcagcttgccgttttccaccagcttctgtagcgcatctaccagcgccacgcaggcacccgtaatgctcgcggtacgcgtgccaccatcagcctgaagcacgtcgcagtccagcgtaatggtgaactcacccagcgctttcaaatctactgccgcgcgaagagcacgggcgatcagacgctggatttccattgtgcgtccaccctgcttacctttcgccgcttcacgagcgttacgggtgtgggtagaacgtggcagcatgccgtactctgcggtgatccagccctggccctgacctttcaggaagcgcggcacgccttcttcaatagaggcggtacacaacactttggtatcgccaaattcgaccagcacgctgccttctgcatgttttgtatagttacgagtcagggtaacgggacgcacctgattattgctacggcctgctggacgcatattgaaatctccggcttgaaacaaatgtggctgcgcattatacggacttccggcggttattcctatcctgacaaggcatcgatggctataatccttccacctctccttttataaacaggaacgtctatgatccgcagtatgaccgcctacgcccggcgtgaaatcaagggtgaatgggggagcgcaacctgggaaatgcgcagcgtaaaccagcgttatctggaaacttactttcgtctgccggagcagttccgtagccttgaacctgtcgttcgcgagcgtattcgttctcgcctgacgcgcggtaaagtggaatgtaccctgcgctatgagccagatgttagcgcgcaaggtgagctgatcctcaacgaaaaactggctaaacagctggtaactgccgcgaactgggtaaaaatgcagagtgacgaaggggaaatcaacccggttgatattctacgctggccgggcgtgatggcagcccaggagcaggatcttgacgccattgccgctgaaattctcgcggcgctggatggtacgctggacgactttattgtcgcgcgcgaaaccgaaggtcaggcactgaaagcattgatcgagcagcgtctggaaggcgtcaccgccgaagtggtcaaagtccgctcccatatgccggaaatcctgcaatggcagcgtgagcgtctggtcgcgaagctggaagatgctcaggtgcaactggaaaacaaccgtctggagcaggaactggttctgctggcacaacgaattgacgttgccgaagaactggatcgcctcgaagcgcatgtcaaagagacctacaacattctgaagaaaaaagaagcggttggtcgtcgtctggattttatgatgcaggagttcaaccgcgagagcaacactcttgcgagcaagtctatcaatgccgaagtgacaaactccgccatcgagctgaaagtgttgattgagcagatgcgcgagcagattcagaacatcgaataactcgtaacgccaattcttacttttccgccttcacaaatgccgccactcaaacagagcggcatttttcttccccgcaacattcaattctgttttgcgtgcctgctccagattttgcgatgtttttttgcccagcacactgagaacgcgagatactcacaactgtatataaatacagttacagatttactttctttgcaattgatatcacatggagtgggcaatgaacgaacatcatcaaccttttgaagagataaaactgattaatgcaaacggagcagaacaatggagtgcaagacaacttgggaaactactgggttatagtgagtatcgtcactttatacctgtattaacgcgcgccaaagaagcctgtgagaacagtggtcacacaattgatgaccatttcgaggagatcctcgatatggtcaaaattggcagtaatgccaaaagagcattaaaagacatcgtactctcccgctatgcctgttacctggtagtacaaaacggcgaccctgcgaaaccggtcattgcggcagggcagacttattttgctatccagacccgacggcaggagcttgctgacgatgaagcatttaagcaacttcgtgaagacgaaaagcgtctgtttctgagaaatgagttgaaagaacataacaaacaattggttgaggcagcacagcaagctggggtagcgacagctactgatttcgccatatttcagaatcatggttaccaggggctgtatggtggattagatcagaaagctattcatcagcggaaggggctgaaaaagaatcagaagatcctggatcatatgggtagtacagaactggcggctaatctctttcgagctacccaaacagaagaaaaactcaagcgggatggcgtgaatagtaaacagcaagcaaacaccacacactttgacgtgggtcgcaaggtgaggcaaaccattcaggaacttggcggaaccatgcctgaggagttgccgaccccgcaggtcagcatcaagcagttggaaaacagtgtaaaaattacagagaagaaataacagaaactaaaaactctttttgttgattgagacacccgatgcgtaagccaaggtccaggtgcagtgaacacaatggctaaatattgcacctttcttttccccctcagttttaacctattttttcttatgcattttctcagacaagaagtcagaagaatgcatctctgctacagaaaatagcgatttcacataactacaagttatcaatttcccctccccttaaaaaatctcaatcgtgacaatgcgcacaaatcgctaccctgccagacagatttttagggagagaaccatgctgttatacattttgtatttggttggcattactgccgaagccatgacgggggcgctggcggccggacgacggcgcatggatacatttggcgtaattattattgcgaccgccaccgcaattggcggagggagtgtgcgcgatattctgctgggccactatccgctcggctgggtcaaacacccggaatatgtgattatcgtcgctaccgccgcagtactcaccactatcgttgctcctgtaatgccttacctgcgcaaagtgtttctggtgctcgatgcgctcggactggtggtcttttctatcatcggggcacaggttgcactggatatggggcacggcccaattattgccgttgtcgcggcggtaaccaccggcgtgtttggcggcgttttgcgcgatatgttctgtaaacgtatcccactggtattccagaaagagttgtatgccggtgtcagttttgcctccgccgtgctgtacatcgcgctgcaacactatgtttctaaccatgatgtggtaattatctccaccctggtattcggcttttttgcccgcttactggcgctacgccttaagctgggattaccggtcttttactacagccacgaaggacattaaggttcaaaacctgtgatctgctgggcagccagccaactgcccagcttcttgatttgcgcattttccttccattcaataacctgtctggcgcgtccgcttccagtccccggcagctgctgccagaactgctccgtgctaaataaaagttggctccaggaccgttcatcactggcattaagcgccgcccgggttagcggtattcccattgccatcacccagcgagtaaaaggctgcttacgagccagattaaactgatgccatagctgcgcacttttacttttcgcgatccccggcgtgttctgtaattgctctggcgttaataaaagccaggaaaagatatgttcaaagcgatgagtctgatgcagcgcgcgccaaccggcctcaccaatgccatccagcccaagaacctgttttgcccccagccagactaagcgactaatgaactgttcctgacaaacatcagaagcaaagtagcaggtcaagctgttaaagcggttttctggcggtgtcggttttgtacgttctgcaccgcgccacaccacatcatcaatgcgaggaataccctgaccggcaaggctgacgagaatctgatcaccaggcgcaatatcccactcctgccagcgcctgacggaaccaatattcacccgctggacttttttatcatccagcatgacaggtgcgagactcgcaaccacgcttattttaccgctcttacccaccgcaaactgaattgccttcacttcggcaacctgagctacaggttgatatttccaggccaccagccactctgcctggcccggtagccaatggcgggattctggctctttcgccgctcgtacaactacgccatcggtgacgaagggtaattccgctttccaccactcattgcgtacgcgcgcaacttcatcagcatttttcaccgcacgggtatacgtctgcgttagagtaaaacctgcggtagccagctcttttaaacgatcagacattaactgcggtccatccggccatgcccagacaaaaacgcccagagaattcagcgtgtcgctatcgtcctggcgcatcatcaagccagcaacttttgcgcgggcatttattccccccatttgttgttggatatgcccctcgcgctggagaaatatttccccctgaagcgtactgttggctaaaggcccgctaacggtttgcggcacagcggaaattaagctaactttctgcgtccagtcctcgcctttcaggccattaccgcgactgattgctttgttcagtttcccgtcccgataaaccagggttaccgcaacgccatcaacttttggctgcacccaaagatcgctacgttctcgcatccacagacttaatgcgtttttatccaccattttgcgtacacccgtatgggcaaccggatgcataaccgcaccatttaaaggcggcatcatcacgtcgcggggctcgctcccaaagcagcgttgccactgcgtaagacgggcgcttaactgatcgtaaacaccgtcttccacctcactttttccttccttccagtagtcatcgtcccactgttttatttgctgttgcaggcgggaaatttcttcctgtgctctggctgggctccaggccggacagaccgcccacacagaactttgccagcacaagatacctattaatatcgccatccatactttcatcatcacctccgctgtagatagtcaggcagatatacaacgtgatgaaagcaaagccgagtggcaaaaacggagtctgcgaggacgcttcctgaaaatcgtctttattgcagtgaatgacaggcaaatgcggaagcagctacgcaaaacgcaacaactttgcgcaaaaagtgtgagcaagggctacgtcacatggccgcgccgtgtataataagctcgtatgtaggctttatttcgctaatcacatacgaaagatactcatggctcaaggcacgctttatattgtttccgcccccagtggcgcgggtaaatccagcctgattcaggctttattaaaaacccaaccgttgtgtgacacccaggtttctgttagtcacaccacacgccaaccgcgtcctggtgaagtccacggtgaacattatttctttgttaatcatgatgaatttaaagaaatgattagcagagatgcgttcctcgaacacgcagaagtttttggtaattactatggcactagccgtgaggccattgagcaagtactggcgaccggtgtcgatgtttttctcgatatcgactggcagggcgcgcagcaaattcgccagaagatgccgcacgcgcggagtatctttattttaccgccgtccaaaattgaactggaccgccgtctacgcggtcgcggtcaggacagcgaagaggtcattgcaaagcgtatggcgcaagctgttgcagaaatgagccattacgccgaatatgattatctgattgtgaatgatgacttcgataccgcgttgaccgatttgaagaccattattcgcgccgaacgtctgcgcatgagccgccaaaagcagcgtcatgacgctttaatcagcaaattgttggcagactgaacctgatttcagtatcatgcccagtcatttcttcacctgtggagctttttaagtatggcacgcgtaactgttcaggacgctgtagagaaaattggtaaccgttttgacctggtactggtcgccgcgcgtcgcgctcgtcagatgcaggtaggcggaaaggatccgctggtaccggaagaaaacgataaaaccactgtaatcgcgctgcgcgaaatcgaagaaggtctgatcaacaaccagatcctcgacgttcgcgaacgccaggaacagcaagagcaggaagccgctgaattacaagccgttaccgctattgctgaaggtcgtcgttaatcacaaagcgggtcgcccttgtatctgtttgaaagcctgaatcaactgattcaaacctacctgccggaagaccaaatcaagcgtctgcggcaggcgtatctcgttgcacgtgatgctcacgaggggcaaacacgtagtagcggtgaaccctatatcacgcacccggtagcggttgcctgcattctggccgagatgaaactcgactatgaaacgctgatggcggcgctgctgcatgacgtgattgaagatactcccgccacctaccaggatatggaacagctttttggtaaaagcgtcgccgagctggtagagggggtgagcaaacttgataaactcaagttccgcgataagaaagaggcgcaggccgaaaactttcgcaagatgattatggcgatggtgcaggatatccgcgtcatcctcatcaaacttgccgaccgtacccacaacatgcgcacgctgggcagtcttcgcccggacaaacgtcgccgcatcgcccgtgaaactctcgaaatttatagcccgctggcgcaccgtttaggtatccaccacattaaaaccgaactcgaagagctgggttttgaggcgctgtatcccaaccgttatcgcgtaatcaaagaagtggtgaaagccgcgcgcggcaaccgtaaagagatgatccagaagattctttctgaaatcgaagggcgtttgcaggaagcgggaataccgtgccgcgtcagtggtcgcgagaagcatctttatagcatttactgcaaaatggtgctcaaagagcagcgttttcacagcatcatggacatctacgctttccgcgtgatcgtcaatgattctgacacctgttatcgcgtgctgggccagatgcacagcctgtacaagccgcgtccgggccgcgtgaaagactatatcgccattccaaaagcgaacggctatcagtctttgcacaccagcatgatcggcccgcacggtgtgccggttgaggtccagatccgtaccgaagatatggaccagatggcggagatgggtgttgccgcgcactgggcttataaagagcacggcgaaaccagtactaccgcacaaatccgcgcccagcgctggatgcaaagcctgctggagctgcaacagagcgccggtagtagctttgaatttatcgagagcgttaaatccgatctcttcccggatgagatttacgttttcacaccggaagggcgcattgtcgagctgcctgccggtgcaacgcccgtcgacttcgcttatgcagtgcataccgatatcggtcatgcctgcgtgggcgcacgcgttgaccgccagccttacccgctgagccagccgcttaccagcggtcaaaccgttgaaatcattaccgctccgggcgctcgcccgaatgccgcttggctgaactttgtcgttagcagcaaagcgcgcgccaaaattcgtcagttgctgaaaaacctcaagcgtgatgattctgtaagcctgggccgtcgtctgctcaaccatgctttgggtggtagccgtaagctgaatgaaatcccgcaggaaaatattcagcgcgagctggatcgcatgaagctggcaacgcttgacgatctgctggcagaaatcggacttggtaacgcaatgagcgtggtggtcgcgaaaaatctgcaacatggggacgcctccattccaccggcaacccaaagccacggacatctgcccattaaaggtgccgatggcgtgctgatcacctttgcgaaatgctgccgccctattcctggcgacccgattatcgcccacgtcagccccggtaaaggtctggtgatccaccatgaatcctgccgtaatatccgtggctaccagaaagagccagagaagtttatggctgtggaatgggataaagagacggcgcaggagttcatcaccgaaatcaaggtggagatgttcaatcatcagggtgcgctggcaaacctgacggcggcaattaacaccacgactagcaatattcaaagtttgaatacggaagagaaagatggtcgcgtctacagcgcctttattcgtctgaccgctcgtgaccgtgtgcatctggcgaatatcatgcgcaaaatccgcgtgatgccagacgtgattaaagtcacccgaaaccgaaattaatgttttatgaacccaacacgttatgcacgcatctgcgaaatgctcgccaggcggcagcctgatctgaccgtctgcatggagcaggtccacaaacctcataacgtttctgcgattattcgtaccgcagatgccgttggcgtacatgaagttcacgccgtctggcctggtagccgcatgcgcaccatggctagcgcagcggcgggtagtaacagctgggtacaggtgaaaacacaccgcaccattggcgatgccgtcgctcatctcaaaggccagggcatgcagattctggcaacccatctttctgataacgctgtcgatttccgcgaaattgattacactcgcccgacctgcattttgatgggacaggagaaaacgggcatcacgcaggaagcattggccctggcggatcaggacatcatcattccgatgatcggcatggtgcagagcctgaatgtttccgttgccagtgccctcattctttacgaagcccagcgtcagcggcaaaatgcaggcatgtacctgcgtgaaaacagcatgttgccggaagcagagcaacaacgcctgttgtttgaaggcggctatccggtgctggcgaaagtcgcaaaacgcaaaggcctgccttatccccacgtcaatcagcaaggcgagatcgaagctgatgccgactggtgggctactatgcaggctgcagggtaagtgccatgaaaggtcgcctgttagatgctgtcccactcagttccctaacgggcgttggcgcagcacttagtaacaaactggcgaaaatcaacctgcataccgtgcaggatctactcttacaccttcccctgcgctacgaagatcgcacccatctctaccccatcggagaactactgccgggcgtttatgccacggtggaaggcgaagtgctgaactgcaatatctccttcggcggtcggcggatgatgacctgccagatcagcgacggttccggcatcctcaccatgcgctttttcaatttcagcgcggcaatgaaaaatagcctggcggcgggccgccgtgtactggcttatggcgaagcaaagcgcggtaaatatggtgcggagatgatccacccggaataccgcgtgcagggcgatctcagcacgccagaattacaggaaacgctcacgccggtttatccaacaacggaaggcgtaaagcaggccacgctgcgtaaattaaccgaccaggcgctggatctgctcgacacctgcgccattgaagaactcctgccgccggaactgagtcaaggaatgatgacgctaccggaagcgttgcgcactttgcaccgcccgccaccgacgctacagcttagcgatctggaaaccgggcagcatccggcgcaacgtcgtctgattctggaagaactgctggcgcacaacctcagcatgttagccttacgtgccggagcacagcgttttcatgcccagccgctgagcgccaatgacacgctgaaaaataaactcctcgccgccttaccgttcaagccaacgggcgcacaggcacgcgtagtggcggagatcgagcgcgatatggcgctggatgtgccgatgatgcgtctggtgcagggcgatgtaggttccggtaaaacgctggtcgccgccctcgccgcgttgcgtgcgattgcccacggcaaacaggtagcattgatggcaccaaccgaattactcgccgagcagcacgccaataacttccgcaactggtttgcaccgctcggtatcgaagtgggctggctcgccggtaagcagaaaggtaaagcacggctggcacagcaggaagccatcgccagcggtcaggtgcagatgattgtcggtacacacgccatcttccaggaacaggtgcagtttaacggcctggcgctggtgattatcgacgaacagcatcgttttggcgtgcatcagcgtctggcattgtgggagaaaggccagcagcagggcttccatccgcatcagttgatcatgaccgccacgccgatcccccgcacgctggcaatgactgcgtatgccgatctcgataccagcgtgatagatgagctgccgccaggccgcacgccagtgactacggtcgctattcctgatacccgccgtaccgacatcattgaccgcgtgcaccacgcctgcataactgaaggtcgtcaggcatactgggtttgtacgttgattgaagagagcgaattgctggaagcgcaggcggcggaagctacctgggaagagttgaaactggcgctaccagagttgaacgttggcctggtacacgggcggatgaaacctgccgagaaacaggcggtgatggcgagctttaaacaaggtgagctacacctgctggttgccacaaccgttattgaagtcggcgttgatgtgcctaacgccagtctgatgattatcgaaaacccggagcgtctgggtctggcgcagttacaccagctgcgcgggcgcgtaggtcgtggcgcggtggcttctcactgcgtgctgctctacaaaacgccgctttctaaaacggcgcaaattcgcctgcaagtgctgcgcgacagtaacgacggttttgtgattgcgcaaaaagatctggagattcgcggccctggcgaattgttaggcacgcgtcagacgggtaatgctgaatttaaagtggcggatttactgcgcgatcaggcgatgatcccggaagttcagcgcctggcacgccatattcacgaacgttacccacaacaggcaaaagccctgatagaacgctggatgccggagacggaacgttacagcaatgcgtaaaaggcggcagtgagaagaccgccatttcaggttaccctaccttcctgccggatgcgattcatcaccctacaaattcaataaattatgaatcaatacgcaggcttgataagcgaagcgtatcaggcatttgtctttgttgcggcggcacttctaccgccgcttcatcggttaaccggcaaaaatcggcaacatcaaatacaacttaattaccagcgcattgacgatatcgataaagaacgcaccgaccatcggcaccaccaaaaacgccatgtggcccgggccaaagcgttcagtgatcgcctgcatgttggcgattgccgttggcgttgcaccgaggccaaaaccacagtgacccgcagccagcactgccgcatcgtagtttttgcccatcatgcgccaggtaacgaagatggcatacaacgccatgaagatggtctgtaccaccagaatcgccagcatcggcagcgccaggctagccagctcccacagtttcagccccatcaacgccatcgccaggaacaagctcaagcttacgttacccagcacggataccgcacgctcaaagacgcggtaaaagcccattatactcagaccgttgctcagaatcacgccaacaaacagtacacagacgaaggtcggcagttcaaaagcagtgccagccaaaagttgcgcaacaattttccccaccgtcaggcagatagcaatcagcgcgatagtttcaatcagcaccaagctggtgatcatgcgtcccacatccggcttttcaaacgccgtcgggacttcctggtcatccggaataccgttcggcgtggtggagtgtttcaccagatagcgcgccaccggaccgccaatcaagccgcccagcaccagaccgaacgttgcacaggccatcgccacttccgtcgcattggtgaagccataacgttcaatgaacaatttactccacgcagcgcccgtaccgtgaccgccggaaagagtaatagaaccggccaacagccccatcagcggatcaagccctaacaagctagccataccaatgccaatggcattttgcatcaccaacagaccaacaaccacaatcaagaagatgccaaccacacgcccaccggcacgcaaactggcaatgttggcgttcaggccaatggtggcgaagaaagccagcattaacggatcgcgcagggacatatcaaagttgacttcccagcccatgctttttttcagtactagtagcgccagcgccaccaacaaaccacccgcaacaggttccggtatggtgtatttcttcaaaaaggagacggaatggaccaacttacgcccgagcagcaacgtcagcgttgcggcaacaagcgttgctaaagtatcgagatgaaacatagttactcctttgtatccgcatcactctttcatactcgtcatacttcatcgcgcagtggcaacttcatgaactatgacgggtatcgagttatgctttcctgggtcaaattctcagctgttaatgaacaaatggcatggattttaagcagaaaaataccaaaagttatataaaaaagtgcatttatctcatttaaatatttagatgaggatgtggcaaacgtttgcttttctctttcggtcagctaaaatgcccgctttgctaccacgggattgttttcgatgtctgtttccaccctcgagagtgaaaatgcgcaaccggttgcgcagactcaaaacagcgaactgatttaccgtcttgaagatcgtccgccgcttcctcaaaccctgtttgccgcctgtcagcatctgctggcgatgttcgttgcggtgatcacgccagcgctattaatctgccaggcgctgggtttaccggcacaagacacgcaacacattattagtatgagcctgtttgcctccggtgtggcaagcattattcaaattaaggcctggggtccggttggctccgggctgttgtctattcagggcaccagcttcaactttgttgccccgctgattatgggcggtaccgcgctgaaaaccggtggtgctgatgttcctaccatgatggcggctttgttcggcacgttgatgctggcaagttgcaccgagatggtgatctcccgcgttctgcatctggcgcgccgcattattacgccgctggtttctggcgttgtggtgatgattatcggcctgagcctaattcaggttgggttaacgtccattggcggcggttacgcagccatgagcgataacaccttcggcgcaccgaaaaatctgctgctggcaggcgtggtcttagccttaattatcctgcttaaccgtcaacgtaacccttacttacgcgtggccagtctggtaattgcgatggcggccggatatgcgctggcgtggtttatgggcatgttgccagaaagcaacgaacctatgacgcaagaactgattatggtgccaacgccgctctattacggtcttggcattgaatggagtctgctgctgccgctgatgctggtctttatgatcactagcctggaaaccattggcgatatcacggcgacctctgacgtttccgaacagccagtgtccggtccgctgtacatgaaacgcctgaaaggcggcgtgctggcaaacggcctgaacagctttgttagcgcggtgtttaacaccttcccgaactcctgcttcgggcaaaacaacggagtgatccagttgactggtgttgccagccgctatgtcggttttgtcgtcgcgctgatgttgatcgtgctgggtctgttcccggcagtgagcggttttgtacaacacattccagaaccggttctgggcggcgcaacgcttgtaatgtttggcaccatcgccgcctccggtgtgcgtatcgtttctcgtgagccgctgaaccgtcgggcgattctgattatcgcgctgagcctggcggttggtctgggcgtgtctcagcagccgctgattttgcagtttgcccctgaatggctgaaaaacctgctctcctccgggatcgccgcgggcggtattactgccatcgtgctgaatctgattttcccaccagaaaaacagtaattcactggcggcggtaagataattaccgccgcagtctcacctctttaaccattcccgccttgaggattgcgcgtaaatcgtgcataactcccttatgtgcatttcacgggatggaagaccatgaaatttattgggaagctgcttctctacattctcatcgctctgttagtggcgatcgctggcctctattttcttctgcaaacccgctggggagcagaacatatcagcgcatgggtttccgagaatagcgactatcatctggccttcggggcgatggatcaccgtttttccgcgccatctcatatcgtgctggagaacgtcacgtttggtcgtgatggccagcccgcgaccctggtggccaaaagtgtcgacattgcgctaagcagtcggcaactgaccgaaccacgccatgtcgataccatcctgctggaaaacgggacgctgaatctcaccgaccagaccgcgccgctaccgttcaaagccgatcgtctgcaactgcgtgatatggcgtttaatagcccgaatagcgaatggaaactgagcgcgcagcgggtaaatggcggcgtagttccgtggagtccaaaagccggtaaagtgctgggtacgaaggcgcagattcagtttagtgccggaagccttagcctcaatgatgttcctgccaccaatgtactgattgaaggcagtattgataacgatcgcgttacgctgactaacctgggtgccgacatcgcccgcgggacattaaccggaaacgcgcagcgtaacgccgacggcagctggcaagtggaaaacctgcgcatggcggatatacgtctacaaagcgaaaaaagcctaaccgacttctttgcgccattacgctctgtcccgagcttgcagattggtcgcctggaagtgatcgatgctcgtttgcaaggtccggactgggcggtgaccgacctcgatctcagcttgcgcaacatgaccttcagtaaagatgactggcagacacaggaaggcaaactgagcatgaacgctagcgagttcatttatggtagcctgcatttatttgacccgattataaacacggaattttccccgcagggcgtagcgctgcgccagttcaccagccgctgggaagggggtatggtcagaacgagtgggaactggctgcgtgacgggaaaacgttgatccttgatgatgcggcaattgccgggctggaatataccttgccgaaaaactggcaacagttgtggatggaaacgacacccggttggttaaacagcctgcaactgaagagatttagcgccagccgcaatctgatcattgatatcgaccctgacttcccgtggcagctcaccgcgctcgatggttacggtgccaacctgacgctggttaccgatcataaatggggcgtctggagtggcagcgcgaatctgaatgccgccgccgcgacattcaatcgtgttgatgttcgtcgcccgagcctggcgctgaccgccaacagcagcacggtgaatatcagcgaactgagtgcatttactgaaaaaggcattctggaagccaccgccagtgttagtcaaacgccacaacgtcagacacatatcagcctgaatggacgcggtgtgccggtgaatattttgcaacagtggggatggcctgaattaccgttgactggcgacggcaatattcagcttaccgccagtggcgatattcaggccaatgtcccgttgaaacctacggttagcgggcaattgcatgccgtgaacgccgcaaagcagcaagtgactcaaaccatgaatgctggcatcgtttccagcggtgaagttacaagcacggagccggtgcggtaaacatcaatctcgccgggtacgactcagacgtacccggcattccatcaatagattacaacgtaattgtcagcgcattcccttgaggcttcaccaccagcccctgctcactttcagcctggctaccgtcttgcagaccatttactttcacaacattgcgcaggcacagtgtccagttcttcgcctcgcccgcaccagtcacagtaatcgtgttgccagtacgtgctgcttttaaagtaaagatcacgcttccgtcagcagcgggcacttcacagacggcttcatgcccgtcttgcagattgaagaggtggaatgccgtgccttcgtgccacacgtaatcgggacgttgatcgttgttgcccagcgccagtagagtgttatcacgcacataaacgggcagactcaggaagccgtgctgctgtttatgccagcgactaccgtcgagttcatcgttgtgccacaggtgtgtccagcgaccttccggcaggtagaactgcacatcgcccgcttcagtgaacaccggcgcaaccatcacgttgtcgcctaacatgtattgacggtcaaggtaatcacaagccggatcgtccgggaactccatcatcatggcccgcatcatcggcgtaccccgcgcgttcgcacgcgcagcttcacgatacagatacggcatcatgcggcatttcagttgcgtgaagaagcgcaccacatcacaggactcatcatcgtaggcccacggcacacgataagatttgctaccgtgtaaacggctatggctggagagcaaaccaaacgcgcaccagcgtttgtaaacgtgcgccggagcggtattttcaaagccgccgatatcgtggctccagaagccaaaaccactaaggccaatagacaaaccaccgcgcaggctttccgccatactttcgtagttagcgtaacaatcgccaccccagtgtaccgggaatttctgcgcaccgacggaggcgctgcgggcaaacaagacagcttcttcctcaccaacggtgtccttgagcacgttccacaccagttcgttgtagatgtacgcataatggttatgcattttctgcggatcggaaccgtcaaaccactgaacatcagttgggatacgttcgccaaagtcggtcttaaagcaatcaacgcccatcgcgaccagacctttcagtttgtcggcgtaccatttgcaggcatccggattggtaaagtcataaatcgccagacctggctgccatttatcccactgccataggctaccgtccgggcgtttgagtaaatagcctttctcttgtaactctttaaagacgggggatttttgaccgatataggggttaatccagacgcagattttcagtcctttcgctttcaggcggcggatcatcccttccgggtcagggaaagtcagcgggtcccactcaaaatcgcaccactggaaggctttcatccagaaacagtcaaagtggaaaacatgcagcggcagattgcgttccgccataccatcgataaagctgtttaccgtcgcttcgtcgtagttggtggtaaaactagtggttagccacaggccgaaggaccacgcgggcggcagcgccggacgaccagtaaagcgggtataacgatcaagtaccgctttcggcgtcgggccgtcgataacaaagtattcgagatattcactctcaacgctgaactgcactttggagactttctcgcttcccacttcaaaagagacacactggggatgattgaccagtaccccataaccacggttagtcatgtagaacgggatatttttatacgcctgttcagtacttgtgccgccgtcccggttccaggtctctaccgtctggccattgcgcaccagggcagtaaagcgctctcccagaccgtaaactgtttcgccaacgccaagatcaagccgctcaaacatataattgcgttgattattcgtgtcctgcacgtagccattatttttcacctgactaccggtaatacgttcgccgttgcgcagaaaatccagactccagaactcacctttgctgacacgcgcgcttaagttgccacttttaaactcagcataacgttctgtgttttcgattgtgaccttcacgtcctgcaaaatattgagcggataatgaggaccgttattcagcgccccctgaaaatgctcaatccgcacaccgacaataccttcctgtggggagaaaaagcgcaacgtaaataaaggcgtatcaagctgccaggtacgttcacgcacatcacggggggcagcatagaccaccatttcattatcctgctgttcaacctcgaacacctgaagcgggtgaatcaaattgaggccaggttgaatcaaccagtttccatcgctaattttcattgccgttccttagttctgcacttcttgagaggtgaattgttgctggcaacggcgtttaccctgagccagctgttccataacggttttcagattgtgcgtcgtgagactgtagtagcgtttagcgataatcgcgctcagcaaataacagatcgccggaacaatcgtgaatagcgcaataatgatgctaatcgtggcgctgttctgcgctttttctgccgcatcatatccgccataagccagcatccagccgataagagcgccgccgaaggccaaccccagtttgagcacaaacagcgtgccagcaaaactgatcccggtcaggcgtttaccattgcaccactcgccgtagtcgacggtatcggacatcattacccactggataggtgtcaccagttgatgcaacacaccaatcacgaagatgaagacaaacatagtgatgctggcctgcatgggaacaaagaacatcgcgaggctaatcactgccagcagggcgttcgtccaccagaagatagtgactttacatttccagtcggtcagaggttttgccagtgcggaaccaatcaggttacccacgcaataagtggtgagaaaagcgacaaacacttccggcgtgcccaaaatccatgtgacgtaatacatcatcgccccaccgcgtacgcacaccgccaggatattgaaaatggttagtaaaccgacaatccgccactggtcgttttgccagatatcacgtaaatcttcccgcatagacgttgttgtaggtggtgcttcaacgcgttctttagtggtgaagaaacaaaatgccagcatcatgaatgccaccacggaaaggaccgcgataccgccctggaaaccgagtggtttattatcaccgccaattaaattaaccagtggcatcatcagaacagtagaaagcatgcctcccgcggtcgccagcacaaaacgccaggattgcaggctgatacgctgagtcgggtcattggtgattacaccacccaatgcgcagtaagggatattgacgacggtataaagtaaggtaagtagggtgtaagtaattgctgcatagatcattttgccgttcatactgagatctggcgtgctataggccagtacacagacgatcccgaatggcagtgcgccaaacagtacccacggacgaaatttaccccagcgagagcgcgttcgatcggccaacaaccccatgcaaggatcggaaatcgcatccagtgcacgagcgaccaaaaacatggttccgacaaaaccggcaggaatgccaaaaatatcggtataaaagaacatcatatataacattacgttatcgaaaataatgtggctggcggcgtctcccatgccataaccaattttctctttaacggacaacacttcactcttcatctgcttttccttgatgctataggggtgctgagaccgataacgcattttgtaaaccatccctgtgagagcgaatattccgatatctggttattaatttatgattcttgttttatgtgatcgtggtagcgttaattccgctcatatatcattgtaaaatatgggttttatatgaactataatgctttcgtgataatacgctgcgtgtattaggcggaaaaaactgatctgggggatgtagaaactcaaggaagtagctataatgcgccccgcctccatgtagcaatcgaggcgcggaagatcgtcgtctccggtgaggcggctggacttcaaatccagttggggccgccagcggtcccgggcaggttcgactcctgtgatcttccgccaaaatgcctctcctgacgttctccaaccccttgtaatactgtcaatccagatattttctactgctcaatattcaatcggcttcaggaatacctggtctaaggttttgtgatggacgatgagcggctgaagaatccgcctgtcggttcttctgtcctcgaacgcatccgcgatattcacgccagtatgcgccgtgtttatttgcaggtgatttgcccccctgctgactctcagccaactgtatcgccattaaggtgaagatgttgttttactcgccccagaacacccttttttatacgactattctatttctttaaccgctggcgaaaaaaactgactataaacttcaccaataatcagactgccatcaagattaatttgttcatttaatatatcaaatcaacttgttttatttttactatcaaaaatagctcattgccttactataattaatatataaattcggtaattaattcttaacatgcttttactaataatctcaattgctggccctataatattgcgctagcattgctttctggttgtatcagcgatactcaaaaattcttaatacaatactcattcgactggtacttatttgtaactcagttatattttttcgcccggtgattcagaagaatgcaaaaaacggctaccactccaagtaaaatacttgatctcactgccgcggcatttttacttgtcgcctttctgacgggtattgcgggcgctcttcagactcctaccctaagtatattcctcgcagatgaactgaaagcccgtcctataatggtaggttttttcttcaccggtagcgctattatgggaattctggtcagtcaatttctggcaaggcactccgataaacaaggcgaccgtaaattactgattctgctatgttgcttatttggagtgctggcctgcacgctttttgcgtggaatcgcaactacttcattctcctcagtacgggcgtacttctgagtagttttgcttccaccgcaaacccgcaaatgttcgccctcgcccgtgaacacgccgacagaacaggccgtgagacggtcatgttcagtacatttttacgtgctcagatcagccttgcctgggttatcgggccaccgctcgcttatgaactggcaatgggatttagttttaaagtgatgtatctcaccgctgccatcgcatttgttgtttgcggactgatagtctggttgtttttgccaagtatacaaagaaatattcctgtcgttacccaacccgtagaaattttaccctccacccacaggaagcgggatacgcggctactttttgtggtctgtagtatgatgtgggcggcgaataatctctacatgataaatatgccgctatttattattgatgaactgcatctaaccgataaactgactggagaaatgattggtatcgctgccggtctggaaattccgatgatgttaatcgcaggctattacatgaaacgtattggcaagcgactattaatgctcattgctatcgtgagtggaatgtgtttttacgccagcgtactcatggcgacgactccggcggttgagctggaattgcaaattcttaatgccatcttccttggtattctctgtggtatcggcatgctttattttcaggacttgatgcctgaaaaaataggctctgcgacaacgttatatgcaaatactagtcgcgtcggctggattatcgccggctctgttgacggaattatggttgaaatctggagctaccatgcgttgttctggctggcgatagggatgttgggtattgcgatgatttgcctgctgtttattaaagatatttaactcaccagtctgggctaagaaaaatcggcgtggcgcaaacagagccatcctcgccatttttgctatcatgcctgcatacataaacgacaaaacagtatgcagagggaaaaatgggttccaccagaaaggggatgctgaacgttctgattgccgccgtgttgtggggaagtagtggggtctgcgcgcaatacatcatggagcaaagccagatgagcagccagtttttgactatgacgcgtttgatattcgccggtttgattctactgacgctgagttttgttcatggcgataaaatcttttctattattaacaatcataaagatgccattagcctgctgattttttccgtggttggcgcgctaactgtacagctcacttttttgctaaccatcgaaaaaagcaacgcagccacggcaacggtgctgcaattcctcagtccgacgattatcgtcgcctggttcagtctggtgcgtaaaagccgcccgggcattctggttttctgcgctattttgacaagcctggtcgggacttttttattggtgacacacggtaatccgacgagtttaagcatctctcctgccgcgttgttctggggcattgccagcgcatttgctgctgcattctataccacctatcccagtacgctaattgcccgctatggcacgttaccagtcgtcggctggagtatgctgattggcggtctgattctgttgcctttttatgccagacaaggaacaaactttgtcgttaacggcagtttgattctggcgtttttttatttggtggtcattggtacgtccctgacatttagtctgtacctgaaaggagcacaattaattggcggtccaaaagccagcattttgagctgtgcagaaccattaagtagcgcgctactctctttgctgttgctggggatcacgttcacattaccggactggctgggaacgctgctgattctgagtagcgtgattttgattagtatggattcccgtcgccgcgccagaaaaataaatcgtccggcgcggcataagtgagaattaccagccaggcaccgcgccaccgttaaaaatggtttctgccgctttagcgacttcgggactttgataagattgcagaaattccttcacgttttctgcattcttattatcttcccgtgccaccaaaatattcacatacgggctattcttatcttcaataaatacgctgtcgtgcaccggagaaagcccggtctgctgaatgtaagtggtgctgataatcgctacatcaactttgggatcatccagtacgcgcgggagctgcgccccctcgagttccataatctgcaaatgacgaggattatcggttatatccagcgcggtaggtaataacccttttccctctttcagagtaattagcttctctttttgcaacagtaaaagtgcgcgaccaaggttggtcgggtcgttggggatcgccactgtcgcgccttcttttatttgcgccacggttttgatttttttggaataacccgccatagggaagacaaacgtatttcccaccgctaccagtttataaccatgcgcctgattatcttgttcaagaaagggtcgatgctggaagacattcgcatcaagttcgccatgatttgtcgcatcgttcggtagcaagctaccgctaaatcctaccagttcaacatcgaggccatatttctcttttgccacctttttagcgacttccgcgacatcttgttctgcgccatttataacgccaactttaatgtgttttgcatcgctgctactctggtcgcaacctgccagcagaattccggccagcaataatgcggcccctgtccgtagatgatgtgttgtcagtttcatttttttatccttttattaatgattacctgactatagcggtaaggtcgctgcggtttaaaaaacgaaacgctatcgataagaataaaaaggaataaaagtggaatataaagtctggcacttcttactgaccacgcaagcgcgtttcgtacagcatgatgagagcgatgaaagcaaactacacttatgcttcattcgatacacatttgtaaaaggttgaatccatgaaaccaacgacactactgcttattttcacttttttcgctatgccaggcatcgtatacgccgagagcccttttagcagtctgcagtccgcaaaagagaaaaccacggtattacaagatttacgtaaaatttgcacgccacaggcgagtttaagtgatgaagcgtgggaaaagttaatgttgagtgatgaaaacaataaacaacatatacgcgaggccatcgtggcgatggaacgtaataatcagagcaattattgggaagcgttgggtaaggtagaatgcccggatatgtaagaacagcaacaactactgaccaacgcttctttacctgatatcaggatttcttcattttcacctttgcagtaaccaacaatgcagtcagcaacatcaatgtgccggacaacatcaacgggctagtcagaccaatattatccagcgcataaccgccgattgccgcgccacaggtattagcaagctgaataaccgccacctgaatagacccggctttttctgcctgatcggccaggctgcgggtgatccacgtactccagccgacgggaaccaatgcaaaagttagcccccagataatcgccacgccggtagcaacgattttatcgcttccccacaacgtcagtaccaacgcactcacagccagtattaacggcgcgcctgctaaggccagttttacgctacgtttaagaatgaagctgctaaggctcgtaccaataaagctggcgataccaaaactcaacagcaccagcgttaagccatccacgccgaatcccgccaggttcatatacaccgggcgaatatacgtgaagaaagcaaactgcccggcgaaagacatgaagatggcgatcatccctgccatcacacccggacgttgtaataagcggaaagtattttgtttctgatggctgggttcgcctggcagactaggcaaacttttgataatccagaaaatacacagcacgcccatcaccgccgccgcattaaagacattgcgccaaccgataagctcgcctaaaaaactgcccaacggcgcggcaatcaccagcgcaatagaaaccgcgccgaagatcacgctcagcgccttcggcaccgtacgcggcggcaccagacgcatggtcaggctcgcgctcatcgcccagaacccgcccagcgccagccccagacaggcacgaccgattaaaagcaaactgaaactgttagcaaaggaaaccagcaagcaggagagcgtcagcaaaacggcaaacaaaataacaacgtagcggcggtcagtagcctgaattgtctgggtaataaacaaactggcaaacattgccacaaaggcggtcacggtcacgctttgcccggcaaccccttcgctaatgcctaaatcctgggccattggcgtcaacaaactgacgggcaaaaactcaacgataatcagacaggcgacacaaaacgccacgctgaaaacggcactccagttcggtcgggtgatggcatccgcgccgcggttttcggcaataaattcactcatggtgttacccgtggcatgtttcaggggaaaagcgctccactttaacatactaatgtgactcgcatttaacgtttttgcaacttttacggtgttgctactgctggagttaagatcgaaacggaacagggcaaagattaccggatgcggcgtgaacgtcttatccacccgacaggtcaggcgcggtctgtaggctgataagacgaaacggtttcaatgcaaccagtgaacgccctcggcaggctgaaagaacgcgttatagcgcatctgaaaagcattaatatcctgcatttcaggttcggtttcgcgcagaaaacctagcgccagcctgacctgagcgtcggtaatcggcgcggcgaggcgagctttttgtaaaatccgatgccattgcagcaggttctgttcgctaccatcgacaatgacaatttgccagatgagcaacacctgcgcggcgttttgcaggtggctctcatccggacgatgcaaataacgtaaaaattcgtcaccagcactctttcccatttgatcgaccatgctctccacgggtacgacatcgatgttcagccgatcgctgagacggcgaatcgcttttctggccccggatgtcagcacccgaaaaccaaccacaaacactaccgccagcgtggcgagcattatccagatcatgagttctcctgcgtaatcagaactcatgatatctggaaaccctcgccagttattaatccaccagaataatcttcagtgcaaacagagctgcgaccaccaccacacacaggttcagatcgcgccagcgcccggtgcatactttcatgatgcagtagctcataaagccgagtgcaatcccttcggtgatgctgaaagtaaagggcatcatcaccgtggtaataaacgcaggcacgctttcggtaaaatcatcccagttaacgcgcgccaggctgctagtcatcagcacgccaacaaagattaacgctccggcggttgcgtaaggaggaactatcgccaccagcggactgaagaacataaccaacaggaacataacgccaaccacaaccgcagtcagccccgtgcggccaccgactgccacaccagaagtactttcaatataggcagtaacagagctggtgccgataaacgcacccgccacgctactgacgctatcaacatacagcgccttattcatattggggaatttaccgttaccatctattaagcccgctttatcagttacaccaattaatgttccactactatcaaataggttgatcagcataaaggagaaaatgataccggcgagttcaagtgttaacgcgccgctcaaatctacttcaccaatgacgccgctaatatcaggcggaatggaatagacgccgctaaaatgaacatcaccgaaaaataatccacagcaagacgtcaccacaatagaaaccagcaccgcggcatgaaaatgacgactactcaacacggttataataaaaaaccctaaaatacctaacaacacgccgtgagaacttaaatcgccaatcatcaccagcgtgtctttattggcgacaataacgccagtattttttaatcccattaaggcgataaataatccaattccgctggtgataccaatacgtaaacttaagggaatgttggagatcatccagtaccggatacgaaacagcgtgagcaaaaatagtccaactgcgccccagaatattgcgcccatcccggtctgccaggagatgcccatcgcccccacgaccacgaaggcaaagaaggcgttcagccccattgccggagccagcgccacgggtaagttagcaaatatccccatcgcaatactgccgataccggcaatcaaacaggtggtaacaaacaccactttcgggtccatttgtgccgcgccgaggatttgcgggttcacaaaaacgatgtacaccatggttaaaaaagtggtcatccccgcaatcaattctgtgcggacggtggtcccatgctgaggtagtttaaataatcggctaagcgtcccactttcattactcacgtaatcggtattgtcattattcatttttttgtccattggaggagatttaatcccttgcttttgtaaaacaaatgacaacaacggttcagtgataattatcacatttcaattgcacattaatggatattctttaataatctcgcgacgtttctttatgataaataataatcaaattgataaaatcaaaatgagaaaaatatgaataattctattaaccataaatttcatcacattagccgggctgaataccaggaattgttagccgtttcccgtggcgacgctgttgccgattatattattgataatgtctctattctcgacctgatcaatggcggagaaatttccggcccaattgtgattaaaggacgttacattgccggtgttggcgcagaatacactgatgctccggctttgcagcggattgatgctcgcggcgcaacggcggtgccagggtttattgatgctcacctgcatattgaatccagcatgatgacgccggtcacttttgaaaccgctaccctgccgcgcggcctgacgaccgttatttgcgaccctcatgaaatcgtcaacgtgatgggcgaagccggattcgcctggtttgcccgctgtgccgaacaggcaaggcaaaaccagtacttacaggtcagctcttgcgtacccgccctggaaggctgcgatgttaacggtgccagttttacccttgaacagatgctcgcctggcgggaccatccgcaggttaccggccttgcagaaatgatggactaccctggcgtaattagcgggcagaatgcgctgctcgataaactggatgcatttcgccacctgacgctggacggtcactgcccgggtttgggtggtaaagaacttaacgcctatattactgcgggtattgaaaactgccacgaaagttatcagctggaagaaggacgccggaaattacaactcggcatgagcttgatgatccgcgaagggtccgctgcccgcaatctcaacgcgctggcaccgttgatcaacgaatttaacagcccgcaatgcatgctctgtaccgatgaccgtaacccgtgggagatcgcccatgaaggacacatcgatgccttaattcgccgcctgatcgaacaacacaatgtgccgctgcatgtggcatatcgcgtcgccagctggagcacggcgcgccactttggtctgaatcacctcggcttactggcacccggcaagcaggccgatatcgtcctgttgagcgatgcgcgtaaggtcacggtgcagcaggtactggtgaaaggcgagccgattgatgcgcaaaccttacaggcggaagagagcgcgagactggcacaatccgctccgccatatggcaacaccattgcccgccagccagtttccgccagcgactttgccctgcaatttacgcccggaaaacgctatcgggtcattgacgtcatccataacgaattgattacgcactcccactccagcgtctacagcgaaaatggttttgatcgcgatgatgtgagctttattgccgtacttgagcgttacgggcaacggctggctccggcttgtggtttgcttggcggctttggactgaatgaaggtgcgctggctgcgacggtcagccatgacagccataatattgtggtgatcggtcgcagtgccgaagagatggcgctggcggtcaatcaggtgattcaggatggcggcgggctgtgcgtggtacgtaacggccaggtacaaagtcatctgccgttacccattgccgggctgatgagcaccgacacggcgcagagcctggcggaacaaattgacgccttgaaagccgccgcccgtgaatgcggtccgttacccgatgagccgtttattcagatggcgtttctttctctgccagtgatccccgcgctaaaactaaccagtcaggggctatttgatggcgagaagtttgccttcactacgctggaagtcacggaataataaaaaaagcccggcgtcatgccgggcaaaagtcaccagttacgtttatgccactgtcaactgctgaatttttttctcgcggcggattttgcgttcttccattaccgccactatcgccatcaggcagatacaaccaatcgcggcgatatccagcgcggcgaaggtgcctgcccagccggtaaggccgaataccggcgtcccatcggcaatcattcccagacctaacttggcaaagctgtcaccaatcaggtaagcaaaggtgcctttaataccatcggcagcgccaatcgcttttttaggtacaaagccaacagcagccacaccaatcaacaattgcgggccaaagaccaggaaacccaacgcaaagagagaagccagatagatatattcgttactggcatgttgatacacaccgagcgtggcgataatcagcgccagcgcgatgcaggccaccaggccacggcgaccgttcgccaggtcagagagccagccccacagcagcgtaccgaccagcgcaccagcttcaaacagcgtaaagccctgaatcgccaccgctttagagagtttcagttcctggaacgcgtatacggtactccactggtcgataccaatacgtaccacatagaggaaaatgttggcgaagcacagcagccagatcactttgtttttcagcacatactcaacaaagatctgccacttggtcatatcggtagattctgtctctttgtcctcttcgctgatctcctcgccgaacagttcttcagctttgccgaggccataagattccggggagtcgctgccgtaacgcaggccgataaaaccgacaatcagcgcgataatgctcgggaagataaacatgccgatgacatggccatcgaacaggtaatttgccccgaacagcgccacacctgctgcgcctgcaccgccaaggttgtgagaaatattccagaaaccgaggaatgtcccgcgtttacgacgcggcgtccatttggtgatggtggagtaactgcagctaccgccggtactctggaaaagccgcttaaggcgtagaaggcaatcatcaggaacaggctaacgctgccgctgcccatactggcactgaagcccagcatacaaatagcagagaggatcagcatgaacggcaggaattgtttggtgtttttgccgtcggcgtagtaggaaaccagcgttttacccacgccataagtgatggagaaacccaggccgatcatccccagctgcgtcatgctcaacccgtaggtgctaatcatatcgttctgcgcgatgttaaagttcttgcgaatcaggtacatcgtcaggtagccgataaagaccaccaggtaggattgcatgaacggtttgaaccacattttgcgccgcacttcgagcggaaggtccagggtcggcttgcgaacctggtttaagaaagccagcatgggttactcctgaaatgaatacctgcgtgaggcatgcattgtaaaaatcagcagcaaatcaggcctgagatagcgtccaggcaaaacctggaaaatttcttagttttgccggatatgaagtgaaaaggtgagatgcatcacgcttcgcgcggtgtctgggcgttcaaaaagggcagtaacagcagtgcggaaatcccggcggcgatagagataaccacaaaaaatccgctccagtgccaggtatcgagtactttcgccagcggccaaccagcaaggctcgcccccagataagcaaacaagccgacaaaccccgtcgccgcccctgccgcctctttgtgggaacactctgccgccgccataccgattaacatctgtgggccaaagacaaaaaaaccaatggtgaagaagcaggttgcctgcatcacgtagctggcaaatggcatcagccacagggagccgacactaagcaaaattccggcggcgaaaatcaaattcatcggccctcggttgccgttaaacaatttgtcgctgccccaaccggctaccagcgcaccgataaatccgcccagttcaaacatcgtcactgccgtattcgccgtgaccagatcgacgcccagtgtctcggacatatacaaattgccccagtcgttgatcgccgcccggaccacatagaccagcacatagcaaaagctaagcagccagatatacggattcagcaacacatatttggtgaggatctctttacgcgtcaaccctgccccttcttgttgttgagcaatttccagcgcgtcgtgtcgccattcaccgaccgccggtaaacctaacgcctgcgggcgatcgcgtagccgccagcagagaaaaatccccacgactatcgccatacaaccagcaatcatcatcccggcacgccagccgtaatgcagcgcagccgctgccatcacaatgggaatgagtgcgccgccgacgttatgcgccgtgttccataatgcccaccaaccgccgcgctcggtacgactataccaggccgttaacagacgcgcacacaccggactaccccagccctggaaaaaggcgttcagcacccagagcacggcaaacgcccataggctcgtgctgaagccaaacagaatgttgataatgcccgtggcgataagccctatccccataaaataacgggcattactgcgatcgctgacaatgccggagacaaacttgctcacgccataggtaatgtaaaacagggtcgctaacaggccgatatcgctacggctgagcacgccgttagcaaggatttctggtacggcggcgttaaaacttttccgcgtgaagtaaaacagcgcgtaacccagccagatggtcagcagaatatgccgacgccagtagcgatagcgggcatcaatttcatatttatcagtcattaatggcgcatcggcaggcgctttcagaaacggcaacatcatcaaaccttagacatagcgttgaggtagagaaacgctgacacgcgtgccgtgcagacaggaaatgtgtaatgtgccacccagcgccgttacgcgctcgcgcattccggtgaggccaaaaccttgttgcccggaacccggcggcaaaccgctgccatcgtcttcaataaccagcatcaaccgttcatcctgctgccagccttgcagggtgaccgcgctggcatcagcatgtttcacaatgttgttcagcccttcctggcagacacgaaacagcgtcacgcgctggttttcgcttaacgcactttcatcgattcgccattcgagatggctgacaataccgcgcccttccagctccatttcccgcatcagactgcggatggcctgctccagggtgagatcatccaactggcgcggacgtaaccgacccaacaaacggcgcaccgcgtcgtaaacgcccaggcttagttgttcgatgagctgcccgctctgcttcacgctggcgttatctgccgccagccgctgaacaatgcccgcctgagtacgaatagcagtgatggtctgaccgatatcatcatgcagctcacgcgccacatcacggcgcacgctctcttcggtttccagcaaccgttcagccagatgctgattgcgcgccagttccttttgcaggctctggttaagttcacgcaaccgctggatgccagcgccaagcaacaaccctgtcagactttgcaccagcaggctgagcaataaatccaccggatgatcgcgccaggtttgactggcgatcagcgcgatggcgttcatcaacgtcgcaatcagcgccccttgccaaccatagtgccaggccagcgcgataatcggcagcgccagacagaatggcgtaaagcggctcagttcgtccggcaatcccaactggagccagagactgataacaaacagcagcaagtaccagaccagatgtcgcccgcgccagttgattggctgagaaaccagactcggaccgagcggcagccaggtgttattggcgagatagtgccagaacaccagacatatcggggccagcgtcaggccgccagttaaagtcagcaacagcgcattccagctctctttgccgtgccaaagccagggcaggctctgcaacaacgccgccgccgttaacgccgccccctgtaacagcaaggtgcgccagtcacgctgatggcgatagcggctgatcagcgctacgggcagtaacgtcagtaaactaccgatcatcaataacggaaaatgggttaaaccgaccgcctgcgttagccagtaaatcagcagccactccgcgcccagcaatacgggccagtatccgcgcgggcattgcagcattagccccagacgcagaccaaacggaaataacagcaccgccatatcagggcgctcaaccagatgcaggctgatactccacaggcaaaaccatgcggcagagaagataaaaaagcaggcaataacggtaattaagcgggagaacaacgtcttcatcaccagccatcaaacatgcggcgcgccagctctacgtcgttactgacgcccagtttttccatcagattggcgcgatggacgtgtaccgttttcggactcaagcccagttcggcggcaatctctttcaccgccattccttgcgccagtttttccgccacctggcgttcacgtttggttagcgggtcctgacgaccggatgccagtttaatggcaatatccggcgtcagataacagccgcccgtggcaaccgtatgcaccgcagcaatgagttcatccgggctacagcgtttggaaagaaagccgcgtgcccccgcgttaagcgcctgctcaaccagcgcaggactgtcgtgaacggagagcataatcgtcgccatacctttcggcagctggcttagcagctccagaccggagatatcgggcatggagatatcgcaaatacacacctgcacaccgcgccccggcagccccgccagcgcctcgcgcccgctaccaaactcggcaactacctgcaaatcaggttccagccccagcagctgcgcaaagccggagcggacgatgaggtgatcgtctataagggcaacggtgatcatggtcttgtcctggcgggtaaaaaaaatacgcgcttaccttaacgataagcgcgatgttgttcaagccttgagcggttactgaaaaaacaccgcgatcttgttaaacatcgtcggatcggactgattacgctgcactttcacgacatcttccagcttatcgatttggcttatcatctgctccagacgctggtcgtcattgaccagtagccagatatggcttttgtcgctgtcctgaatcggcagacaaagaatgccttcaacgttaaaagcgcggcgggcaaaaaggccacaaacgtgggtcattacgcccggatggttgcgaacggtgagctccagaattacgttgtcatgagttgtgttttgcatggcttattcccccaccatttcagtattcgccgcacctggcggcaccatcgggtaaactttttcttcggcatcaatgcgcacatggatcagcgccgggccagggcgattgatgatttcctgcaaactagcctgcggatcggcttcgttattcaaatcacaggtttcgaggccgaatccggcggcaatctgcataaagttgattttgcccggataggtggcggcaaaaacgccttgctcgtagaacagactctgttgctgatgcaccagccccagcgcttcgttgttcatcagaatgattttgacatccagctgattttcactggcggtcgccatctcctgaatattcatcatcaggctgccgtcgccggagaaacacaacactttgcgatccgggttcgccagcgcagcgccaatcgccgcaggcaggccaaaacccatcgtgcccagcccaccggaggtcagccactggcgtgggcgattgagcggataagcttgcgcggtccacatctgatgctgaccaacgtcggtggtgataattgcattgtcatcgacacaggcggcaacggcgttgatcaggccgtaatggcttaacggatcgcacgctttcgggattggacacggaaactcacgctgcaaatccgctaccaactggtgccactctgcacgcggttgcgcttccaccagcgggatcaactgcgccagcacgtcatcaacatccgcctgaatcgccacgtgcggctgcttgattttacccagctctgcacggtcgatatcgacatgaatgattttggcattcggacagaactgctcggttttgccaatcgcccggtcatcaaaacgcgcaccgagcactatcaacaaatccgcctcctgcaaaatatagttggtgctgcgcacgccgtgcatccccagcatacccaggctcaacggatgcgcttttggcaacatgcccagcgccattaaagtcatggtggtaggcagttgcgctttctccgccagttcacgcacccgtgcgggcgcattgatcacaccgccgcccagataaagcaccgggcgtttggcagcgttaatcatcgccgctgcgtcacgaatgctttcttcgctaaaggcgggggcggcggctttttctgccatagcgggctgtgtttcaatctcaaaaactgccgtttgcacatccttaggaatgtctatccacaccgggcctgggcggccactttgcgcaatgcggaaggcatcgctcatgacctgcgggagttcttcgatatgtctgaccagatagttgtgtttggtgatggggatagagatgccgtaggtgtccacttcctggaaggcgtcggtgccgatcatgctggcgggaacctgaccagtgatgcaaatcagcgggatggagtccagccgcgcatcggcaatggcggtcaccaggttagtcgcacccggtccgctacaggccatacagaccgccggtttaccgtcggtgcgcgccattccctgagcgataaagcccgcgccctgttcatgacgggccagaatatggcggatttgcgtgctttggcttaaggcatcgtaaacaggcaggatagaaccgcccggaatgcctgtcacaatcttaatgccctgctgttccaggaaatgaacgataaattctgcgccggtaaagcgcttacgcgtgcttgttgtgccgctacttgccatgctccagtccttttcttctgggccgactttccgggaggtgcttaaacgaaaaaccccgcccggtttgcgccggcggggttttggaatcgtgtgttgttccagtccttacggcgcattgccgacgaccaccaccacacgcacgacgaccactgcggcggatggcgcagttggtagtagttttgcgttgagcatggaagtagtcattggggaccttgttggttttgtgtttaacaatatttatacaagcacagctttacaggggagacaatggaaaatttttcagcaagggaaaattgaggggttgatcacgttttgtactgaattgcagataacaaaaaaccccgccggagcgaggtttcgtcagtcgcctgcggctggtaaccgcaaagcacactgtattatgtcaacactgaaagtatacgtgttccgcgcagaacgcgcaatttcggcacgaattttgacgtatttagtgcatagttgagtatcgatcacagtttgcgttttgtccaaatattactgtttatttatacagtaaacttctataatatcactgtacgcaatgtgttatgcgggggccgcatcgttacccggcgcactaagttctggctgaaacgggtggtgccgtcagcgccttaaccccgcgtgagcacactgtgttatgtcaacaagcacaacgtttctccttgagataccgcgtgcacaacagctggcaacaggcagcggaaaggtacgtcagctggcagtgctcctgaaccacaggagacgcgtatgaacctggtggatatcgccattcttatcctcaaactcattgttgcagcactgcaactgcttgatgctgttctgaaatacctgaagtaattcagattcaagtcgcaccaaaggggagcgggaaaccgctccccttttatatttagcgtgcgggttggtgtcggatgcgatgctgacgcatcttatccgccctaccatctctcccggcaacatttattgccgcttttgtttacatattctgccgctaaacaattccccattcctggcgtatatctggctaacattcatcaatgtgatagattcctctcccgcatttatgggaatgcgtagtgacttattctaattatttttataaaagcatccgtgataatgaaaaggcaaagaaacgtcaatttgttattgatgttggtattactcgtggccgtcggtcagatggcgcaaaccatttatattccagctattgccgatatggcgcgcgatctcaacgtccgtgaaggggcggtgcagagcgtaatgggcgcttatctgctgacttacggtgtcagtcagctgttttatggcccgatttccgaccgcgtgggccgccgaccggtgatcctcgtcggaatgtccatttttatgctggcaacgctggtcgcggtcacgacctccagtttgacggtgttgattgccgccagcgcgatgcaggggatgggcaccggcgttggcggcgtaatggcgcgtactttaccgcgagatttatatgaacggacacagttgcgccatgctaacagcctgttaaacatggggattctcgtcagtccgttgctcgcaccgctaatcggcggtctgctggatacgatgtggaactggcgcgcctgttatctctttttgttggttctttgtgctggtgtgaccttcagtatggcccgctggatgccggaaacgcgtccggtcgatgcaccgcgcacgcgcctgcttaccagttataaaacgcttttcggtaacagcggttttaactgttatttgctgatgctgattggcggtctggccgggattgccgcctttgaagcctgctccggcgtgctgatgggcgcggtgttagggctgagcagtatgacggtcagtattttgtttattctgccgattccggcagcgttttttggcgcatggtttgccggacgtcccaataaacgcttctccacgttaatgtggcagagcgttatctgctgcctgctggctggcttgctgatgtggatccccgactggtttggcgtgatgaatgtctggacgctgctcgttcccgccgcgctgttctttttcggtgccgggatgctgtttccgctggcgaccagcggcgcgatggagccgttccccttcctggcgggcacggctggcgcgctggtcggcggtctgcaaaacattggttccggcgtgctggcgagcctctctgcgatgttgccgcaaaccggtcagggcagcctggggttgttgatgaccttaatgggattgttgatcgtgctgtgctggctgccgctggcgacgcggatgagccatcaggggcagcccgtttaagcgcacgtcaccgcagcatcgtcatcagctccatgggagaacgatgctgctttatcagatcacgcatcacccgcatatgcggtgcggagtaagaataaaacgcctgatagcccgcacaaagcacgctgtctggcgtctcctgccgagcgtgcgggcacaggcgatgccagtcgcacgcctggcagtcacagcgcggttgcgggttttcgctgccacaccatttttgtaaggtggcgtcaaaaagctcaatgctgatacgactgatatctgcccgcacccaacactcgaacagggcaattaaaaatttcccccacagctctgctgtcacgctagcggccgtcagatcgccccggtcatcaaattcaagatagggaatgagctgtacggagcggatgccccgctgtttgaaattgtgataaaaatcggcaggttgcagagcatccttgtactctacaaccagtttatgcctgtcctcttcagcatcaatgacctgacttcctgtcatgcgactctctcaataaatacgataagttgatgtatatgcgttacagcaaacagtattgcgagagataacaccgcgagggagatcaaaaatttgtcacggactacgtgaaattgggaaaaatcgctattcgtgacatccattaaattgcgattacgggtgtagtgccagaggatcagcgccacgatggcgagaatgccaatgctaatccagaataacatgcccgcctggtgccagttgtgtttgatagccaacgccatcaacgcgccgtagcccagcatggtacgaaaccacgccagacttgtgcgctccggctgcagtcctgggtcggcaatgcgtctggctttgcggctatccggcatacaacaccagtcccataacgttaattatccggcatacaacaccagtcccataacgatcaccgccacgaccatcaatattaagctaatgattaataagctgttggtgtagggcaggtcctctttcagacgcatcgctttttcattgcgtaaccagcgcaagtagccatacatcgctaacccgccggaaaacagacacaacaacaacgccagcagttcgcgaatgacgggcgtggcgaaatctggcgcaagttgatcaagcccaacccccgccgccagaaatcctagtgcagtacggatccacgccagaaaagtacgctcattagccaggctgaagcggtaatcaggcgcttctccgaggcgggaaattttcattgttgctcctttgcaatttcactaacgctctacctttagcggtttttttaagaatttcgtccgcccgtttcctgatatgcttttgccatccgctacaaggaggtcagatgggtatcatagctcaaaataaaatcagtagtttgggcatgctgttcggtgccatcgctttaatgatggggattatccactttagtttcggccctttctccgcaccaccgccaacgtttgaaagcatcgtggcggacaaaacggctgaaattaaaagaggtcttctcgccggaataaaaggcgaaaaaattaccaccgtggagaaaaaagaggacgtagatgtcgataaaatcctcaatcaaagcggtatcgcactggccattgctgcgctactttgcgcatttattggcggtatgcgtaaggaaaatcgctggggcattcgcggcgcgctggtttttggcggcgggacgctggctttccataccttgctttttggtatcggcatcgtgtgcagcattttgctgatattccttatcttttccttcctgaccggcggtagtctggtttaagcagcctgaataatgcccgccgggtgatcatcagcgggcattatcgtcagaacttctgttttttctcctccaccttcaccccttgtgtcggtaggccggtgtcatagtcgcgtacaactgggctatagccatcttgtggacgtggacgaaacgccccatccagcgcggccgtgcatctttacgccacggacgcagactccattggtaactgcggaacggatcgcgaattttgtccatgtaatccaataaggcgtcatgcattttgctgcgaacgtctgcaaaacggatatcatcgatcaggttatgcatttcatttgggtcattacggcgatcgtaaagttcatcactggtgaagaggttgagtaccagtttaaagtcatccgtcacccagcaacgcaccggaataaaaccgccaaagctgtcatgctcaatctcgtagcggttaaattccaccatcacgccgcgtggctctttcacggcaaggatattttcccccggcagaatctctggtttttcaatatctgccagcgccatcattgtcggcagtaaatcgatatgactgactggcgtatcgacctgtcgccgctccccttgcgggctacggatgatcagcggaatgcgggtgatgtcgtcatacatcgccgcccctttactgatcagcttatgtgcgcccatcatttcgccgtgatcggaggtataaataacccacgtattttcacgttgctctggcgttaaggcattgatgacccgtccgatttggtcatcaacaaagtcattacaggcaaaatagagcggatggtgataaagcccgtcatcaccgactgggcttggcatcgcctgcgcccataagcggtgatgttccggtttgttagccaggtcatcctgtgctttctcgcccagctcgtagtaaaaatcagcgtatttctctaaatactccaccggacaggtgaacgggtgatgcggctcatcatagctaaccaccatcaggaaaggctcgtctgcgcgcgcaggctgttgcagaaaatccaccgcccgattgctgatacgatgcgcccaggtgaaggtttcgtcgatatggttcgcctgtaaatcttcgacgctgtttaggccattgcgccacaggctaatctctttttccgtcagttcgctaagatagttcgccccatcgaaccagtaatcagcgtcccactccggcggacactcgccagtgccgaaatagtcatgaccgtcgagatgccatttgccgatgtaacaggtgtgatagccggcatccttaaagtagcgccccatagtggagatgtttttgcctggcgcgacgttgttggtccacgggccggactggttagcgtagataccggtaaatagtccggcccgtgcaggcgtacaaaccggactacaggtgtaggcggaattaaagcgaataccttccgccgccagactatcaatattttgcgtattcagcggtttaccgctatagcaaccgaccatattggtggcctgggtatcggtcatgacgaacagaaaattggggcgtttcataggctatccttcccgtcgggagtaaaggttacggctgggtcgtgacgatgccgccagctgtcaaaaatcaggtagacaatcactacggcggcaatgaaataactgatcatcgctaaccagcgcgtaccgtagccgccgaattcagccagcccggcatagacgccaatcatcgcgaacaggatgccaatactcgcgatcttgacgtttttccacggtttcatgtccaccgcaaacgcatctttgaaggtgaacggcgtggcgcgcggtttgataaaaccgatcaccagcatcacgaccacgttgatgcagaacgtacaggccagcacatagaggaaatggaagtcgaacttcaccagatagttgatggtgatgtagctgattatgccaatccccatcgctacttttgccgccagcgccgggatgcgcgggaagaaaaagcccataatgatgatggtaaccagcggcacgttgtaaatgccgttgagctgtttcatccagctatacagcccctgcggcgcgttggcgatccacggcgcgaccagcacgctaacgatagcgataaagaaaccaaatttgcgcccgacggtgaccagctgctgcggctcggcattctggttaatgatgcgacggtaaatacccatactgaataacgtactggcgctattcagaaagccgttgaaggtactgatcaccgcaccaaataacaccgcgccgaagaaacccaccattggcactggcagaacgttattgaccagcgtcgggtaggccatgtcggctttcggtaaatcctgatacagatgaaacgcaatcaaccctggcagcaccagtaccagcgggtcgagcattttcagcaccgccgttaacagcgcccccttttgcccttccgccaggcttttactcgccagcgtgcgttgcacgatgccctgatttgtacaccagtaaaaggtgttcaccagaatcaaaccggtaaatgccgcgccaatcggcaagggatcggtcgggccaccgatactgtttaatttctcggcgtgaacggtggtgagttgctcaatgccctgcataaagctgcccttgcccatcgcgattaggccaaataccggcaccatcaacccgccgataaccagcccaataccgttgatggagtccgccactgccattgcgcgcagtccgccgatcaccgcatacaaaattcccgccagaccaagcaaaattaccagtagccagatagccgcaccgtgagaaatctgtaggctttccccgacgtgaaacaggctgttgagcgccaacgcgccggagtagagaacaatcggcagaaagcagacgccggtggcaattaggaagcagaagtcgatgataatacgcgtcgttttatcataacgttcctccagaaaatcggggatggtggcaatgccgcgcttcagatagcgcggtaaaaagattagcgcgaggaagatcagcgtcaccgcactagtcacttcccagcccatcacgctcatgccgcttttgtaggcctgcccggaaaggccgaccagttgttccgtggaaaggttggttagcattaagctagcggcaataaccggcgcttttagactacgtccggcaagaaaatagccttgttggcttccggtatctgttttgcggaccttccaccaggtgatcaccgccaccagcagcgtaaaaccgacaaaactcaagatttgtaagctattcatctcatagcccttatttatgtttatgtcccggacgcatgaatatagggagaggtaaaatgcgtcgggtcaggcagtcagattcttaaaatacaaacgtcgtatccctgaacggattgttttctgttaagttcaggttgtgagcataattcgccggagggatattaaaatgaatggaaaattgcaaagtagtgatgtaaaaaacgaaactccgtacaatattcccttattgattaacgaaaatgtgatctccagcggaatttctctgatcagcctctggcatacctacgccgacgagcattaccgggtgatctggccgcgggacaagaagaaaccgcttatcgccaacagttgggttgcggtgtataccgtacaaggatgtgggaaaattcttttaaagaatggcgaacaaataacactgcatggcaactgtattatattcttaaagccaatggatattcactcttatcactgtgaaggtttagtctgggaacagtactggatggaatttacccccaccagtatgatggatattcccgttggtcagcaaagcgttatttataatggcgaaatttataatcaggaactcaccgaagttgctgagttaataactagtccagaagcaataaaaaataatctggcagtcgcttttctgacgaaaattatttatcagtggatttgtcttatgtacgcagatggtaaaaaagatccacaacggcggcaaattgaaaaattaattgccactttacatgccagtctgcaacaacgctggagcgtagctgatatggctgccacgatcccctgtagcgaagcctggttgcgtcgtctgtttttacgctataccggcaagacgccgaaagaatattacctcgatgcgcgtctggatctggcgctaagcctattaaagcaacaaggaaacagcgttggcgaagtcgctgatacgctcaacttcttcgactcctttcatttcagcaaagcctttaaacataaatttggttatgcgccgagtgccgtgctaaagaatacggaccagcacccaacggatgccagtccacacaattaacgtaactctggccagtacgctttgttggcctccagcaactcatccagaatagctttggcgacgctggcgctcggtaccgttttgctcaacgtaatcgcctgccacaggtgctgataactacgctgttcccaggcgtccacgaccagtttttccaccgccacttgctgactcattaaccctttctgaaactgcgggatatcgcgctccaccagtggttcaggccgtagtagcgcacgcgcatctgtttgcgatcttgcagcccaacaatttgcgccatccggctttcaataccgattggcatgtcacagatgttgaggattttcgcattcgggcgcagacgacgcgtggcttctgcgacaatggctgccgggttggagtagttgagcatccaggcatttggactatatttttccatataatccaccagttccaggacgccgccaatggaacgcatgccgtacgctattccgccgggtccgcaagtttcctgaccaacaacgccgtggcgcagcgggattttttcatccagttcgcgcatcgggtatttgccgacgcggatgtgcgccatgacaaaatcaacgtcgctgaatgccacttcaggatcggtggtgtaactaaacgcaatgtccggcgctttttctttaaggatgactttacaggcttcggcaatcacttcctgccgcgcaccatcgttatcataaaatttcagtgcacgaagcgggaaacggtcctgattcgccaggagcatcaacacgatgcctggcgtaaaggtgcttccaccgcctgcgacaaccacactgaatttggtcattatactgcctccgtaatggcaacattttctgcactttgatgagaattaattaagctatcgagctgttcacgcagctgagatacatgcagaccaatgatcacctgaatggcatcgccactacggaagacgccgtgcgctcccagctttttaaagacttcgtcatccagcgtttgactcatgtcatgcagtgcaatacgtaaacgcgtcgcgcaattgttaatgctggagatattgccgaccccgcccagggcttgcaggataccggcagcctgatccagctcttttttttggctctgccgcggtggtttggcctcggctggctttgtattcggctttactgtagagtttcacttccgcatcttcacgtcccggcgtgcacatgttgaactgcagaatcagtgtgcggaaaaccacgaagtacagcagggtaaagcacaacccaatggcgatttgggtcagcatcatatccgcgtggttgctgaacatcgggatccagttttgcggtaaaacttagtcaatcagacctccgcccatgttgcccaccacaccaaagagatacattacggtgctcatactggccgccagcacggcgtgtaccgcaaacagcaacggactaatgaacaggaaggtaaattccagcggttcggtaattcccaccagcatggcggttaaggttgcgggaatcagcaagcccgccacttttacccgattttccggtgcggcagtgaagtacatcgctaaagaaatgcccacggcaccaaagattttactgttaccgtgcagggcaaaaccgccttccgggaacaagcttttcagcggctcggcgctcaaactgaactcttgcagatgctgcgcccagtacatctgaatgccgccttcaacagctgccggaccaaagataaactgtccgtagatgaagtggtgtaaaccggttgggatcagaatacgttcgaggaaggtgtaaacccagaccccaagtgcacccgcgctacgcaggaacgcttgcagagattcaatccccatttgtacttttggccagccgagcaacgtcagccaggcacaggggatcatcaccaggaaggcgataatcaccacataagacgtcccctggaaaatgccgagaaaaaccggcagttttttatcgaacagacggttatgcagcgccgtcacaatgccggaaatgataattgcgccgataatgctggtatcgagggttttaatcccggccatcattgtcagaccgctacctgccaccgcgtcctgagtgaaatcgacgccgaagtagcttccccaggccattcccatcgcgttgatgaaatagttccaggtcaggaaactcaccatcaccgccagacaagcacgcccctgcgcttgcttagcaaggccaatgggtaaaccgacagcaaaaatcagcggcatattacggaataccgtccaaccgccctcttcaataatgtgtacgatttgcgcgaataaactgttcggatcggtcagactttccccgacaaacatcgggttttgcagcaagatggcaagacccaccacaatcccggcgaagggaaacagcagcactggcgtgaacatcgcgccgccaaagcgttgaatttgactgagcatttccacatcctcttttctcaattctgtaagtaggaagcctgattggttatgcggcaggcctggagcgaggataggaagatgcgatcggcagaacatgacgacccaatgggattcgtgatcgctttcatgcttttcgttgggcggtagagatctacgttttcgcgaaaaagtagacctctgtgagcacaggtacacagcatcgaacacatctttaaaaaaaagatgttttttcaatcgattaagcagaacttgtgtgcgcattacccgggcttgcaggcaaaaaagagatctagagatgatctacaaaagcattgcggagcggttaagaattcgacttaactccgcagatttcacgctaaacagccttcttcccggtgaaaaaaagctggcggaagagtttgcggtaagccggatgaccatccgtaaagccattgacctgctggtagcgtgggggctggtggtccgccgccacggtagtggcacttacctggtgcgcaaagatgtactgcatcaaaccgccagtctgaccgggctggtggaggtgttaaaacggcagggaaaaacggtcaccagccaggtgctgatttttgaaatcatgcctgcgcctccggccattgccagccagttacggattcaaatcaacgagcagatctacttctcccgtcgcgttcgttttgtggaagggaaaccgctgatgctggaagacagctatatgccggtaaaactgttccgtaatcttagcctgcaacatctggaagggagcaagtttgaatatattgaacaagagtgcgggattttgattggcggtaattatgaaagcctgacgccagtgctcgccgatagactgctggcgcggcaaatgaaggtagcggaacacacgccactgctgcggatcaccagcttgagttatagcgagagcggggagtttttgaattatagtgtgatgttcagaaatgccagcgaataccaggtggagtaccatttacggcgactccacccggaaaagagttaaccgatactccagaagagcaccgccagtaattggggggtgataatgcgcaggaacattaccaacggatagacagtggcgtaagagagcgccgccgcaccgctggttggatgaagattattagcaaacgccagcgccggaggatcggtcatggaacctgccagcatcccgcacatggtcaggtaattcattttggctaacatccgcgccagaatgccaacagtaatcagcggaacggcggtgatcagggcaccataaccaatccagcttagcccttcgccattgaccagggtattcacaaaatccccaccagatttcagaccaacgacgctgaggaacagcacgatccccagctcccgcagcgcgaggttggcgcttggcggcataaaccagtacagcttgccgatactgccgatacgcccgaggatcaacgccataatcagcggtccgcccgccagccccagtttcaacgcggccgggaatcctggcacaaagacgggaatagaacctaacaatacgcctagcccgatgccaataaacactggcagcatctgaacctgttgcagtttttgctgcgcattccccagcacattggcaacggcatcaattgcggacggacgccccaccagattgaggatatcgccgaactgcaggctgatatcgccactggcgaccagttcgaccccggcacggttcaggcggctgataacaacgtcatagcgttctttaaagtgcaggtcgcgaatacgttttccgagcacgttttcattggtgaccaccacacgctcgacgcgcaaatcagtgcctttcgtggacaggctagtatcgacctcctgaccaatcaccagttgcgcattatgtaaatccgctggctgacccaccagatgcagcaaatcgcccagttggataatggtatctgggctaggaacttttagggtttcttcgcgtttcagacggctgcagataattttgtcgccgttgagaatcggtacatctttaatggctaaatcatgcaggttagggttctcaacgcgaatattgatagtcttgatcagcgcgccgccattggtgcgactagactcgtgctgctgagcttctgtctcgacattgacgcggaaaataacccgcaacatccacatggtgaacaaaatcccgcaaatgccgaatggatacgccatcgcgtaactcatccccatctgatcgaccatttccattggtgtacccaggtcgcgcaaaatctgctgccctgcccccagcgctggcgtattggtaaccgcaccggagaaaatccccagcactaccggcagtggaatatcaaacagtttatgcaggatggcggtaaccagaccaccgatgatgacgatcagaacagcaaacaggttgaggcgtaatccggagacgcgcaaactggcaaagaagcccggccctacctgaatcccgatagtataaacgaacaggatcaggccaaattcctgaataacatgcagcatatcgctacttaatgtcatccccgcctgagaaacaaaatggccgacgatgatcccaccaaacagcacgccgccaatacctaatcctatgccgcgaaatttgacgttgccgataaacaaaccgacgactgccaccaaagccagaatactgaccgttaatgctatatcactcatcgtccatttctcttgagataacattttaattgctacggattatggctgaatcggtgaagcagatttgccttatagcgcacattatcacgggaaagaacgtgccgaaatatcttaaacagtcgaaatttaacgcattgttgagtaagtaagacaaaaaaagccccaccagaatggcggggcaaagagaatagctagttagctatttaacgcgggacgttcgctgatagcgatacgctgcgctgcgatgggttcaggctcattacgaattaaatcaatatgcagtaaaccgtttacgaaggttgcgccagagacttccatattttcagccagcgtaaagctcaggctaaatggctgattcataagcccttgatgcagccattttttctcttcttttggctgctccggcgtgccttttacgctcaggcgcgtaccttccagttgaatctctaaatcttcctgacggaaacctgccagcgcaagggtaatgcggtagtggttatcgtcgcttttctcaatgttgtacggcgggaagctctggctttcaccggcgttttgcagtgcgttggccagtttgtcaaaaccgatccattgacgcatcagtggggataaatcgaagttacgcatagtcatttctccttctaagaagcgagtaagtacctgcaaatccgaagattcgcatatgctccctgacggcgagcatggagatgtcaggccgcgccaggcggccttagggaattagttgatttcgatacggcgcggttttttcgcttccggaatcacgcgttcgagatcgatatacagcaaaccatttaccaggttagcaccacgaacatgaatgttctcagctaactggaatttgcgttcaaagttgcgttcagcgatgccctggtacagataggtgcgctctttttgttcgtcggcgtgagcacctttcaccaccagcagattatcctgggcggtaatttccagttcgctctcagcaaaaccagccacagcgatagcaatgcggtaatggttttcgtctaccagttcaacgttatacggagggtagccgccattactctggctctggttgttttctaagtggttaaacaaacggtcaaatccaatagcagaacggtaaagcggggataaatcaaagttacgcataatcaatagctcctgaaatcagcgagaatgtaagaccttccacaatggacaggtcaggtagccagaacacccatcaggcgcgtcctcatcggctacgatgtaaaaatgggtctggaaatgaacttttcaagccttatcagcggacttttttttgcagtttatggtctattgcatagactgagggggcagcacgaaacgttaaagtgcgatagccgccacagtgcgacgtaatgatgatgttattttcagcaagggatcgctataactcatcaggccaacacccacgatcaacagatgaatttattatgataagaaatgtgttgttagcgttcatgatatgcagcggaatgacattactcggaggatgctccagcgtgatgtcccataccggagggaaagaaggaacgtatcccggcacccgcgccagcgcaaccatgattggcgacgatgaaaccaactggggcactaagagcctggcgattctcgatatgccgtttaccgctgtgatggacacgcttttactgccgtgggatgtgttccgcaaagacagcagcgtgcgcagccgcgttgaaaaaagcgaagccaacgcgcaagccaccaatgcggttattccaccggccagaatgcctgataactgatttagcgatcagtttcggtgatccacagctggccgccttccatccacgccagccactgaccatccgggctgaagaccacggcgtccgcagaaggactattggcgtggtgttcggttaaatactcaacctcgccgctttgcgcatgggcacaagcaattcgattatccagcacaaagcccaaccattctccactcggatgccagttaaatgcagactgaatatccgttttgttatgggttaactggcgcggctcgccgccctgtgggctgataagccacagttgcacaatgccgttatcatctcgcattaaaaacgcgatttgtgtaccctgcggattacagcgcacccagtggcgcgggacgttgactaaccccggataagcccgatggtgggtaaaggttaaacgtcgctgcacgacgccacgcggtggcgcgggcagggttgtttccgttccgcttaacggcgcatcacctgccgctttccagccagcttcatcttgcggtaactcaacgataaacagctccggcactttctcgccctttgggctaagtgtgtcgccaataaatgccagcgcgtgatttcctacccatccttcttcataagcacgattgatttcatcactgccaggctgtggcgtgggcgtggttttgctcaccagcacgcaccagtggctaccgctgtattcacgcggatgctgcttttgtacgttgaccgggccaaacggcgcagcaacaccgacgtttcgcaaatccagcgccggatcgagttcatgcattacatggtcgttataggtaaagctcaccctttcaccgttcgggctaaagacatgcacatggctgccgccgcgcagcactcctggcgtatacggcgcggtaatatccatcgcatcaaggttactcatcttgccgccttcaacaatcactccgcgccgatgatggaagtcgtaatgccatgtttcatcaggattttccgggccgtggatgaaaacatatttctcactcttcggatgaacggtcaccacgccgacgtgtgcgccctgactcgcgcgatagataacctcgacctcgccggtatggatattcacacgctcaatggtctcgccggtaaagctcgcgccagaaggacgcacgtcaaataccagccactggctgtcgggcgtccaggtattggtattggtgagcaggtgattacggggagcaaaggttatctgtttcatggcgcggtcctgatacaaaacgggtcccgccatcatacttcacaaggacttcactttcagacaatagtcttttgccatcgtgatgaatgtgagtgaaaagatggaacatttcgacgtggcgattattggcctcggcccggcaggaagcgcgttggcacgaaagttagcaggcaaaatgcaggtgatcgcgctggataaaaagcaccagtgtggtactgaaggtttcagcaaaccctgcggcggtctgctggcaccggacgcgcagcgatcttttattcgcgatgggctgacgcttcctgtcgatgtgatcgctaatccgcagattttcagcgtcaaaaccgtcgacgtcgccgcaagcctcacgcgtaactaccagcgaagctatatcaatattaatcgccatgctttcgacttgtggatgaaaagcctgatccccgccagcgttgaggtttatcacgacagcctgtgccgaaaaatctggcgtgaggatgataaatggcatgtcatttttcgtgcagacggctgggagcaacatattaccgcccgctatctggtcggtgccgatggcgcaaacagcatggtgcggcgacatctctacccggatcatcaaatccgtaaatatgtcgctatccagcagtggttcgcggagaaacatccggtgccgttctactcctgcatctttgataatagcataactaactgttatagttggagtatcagcaaagacggttattttatctttggcggtgcctatccaatgaaagacggtcagacgcgtttcacgacgctgaaagagaaaatgagcgcctttcagttccagtttggtaagacggtgaaaagcgaaaaatgcacggtgctgtttcccagccgctggcaggattttgtctgcggtaaggacaacgcctttctgattggtgaagcggcgggatttatcagcgccagcagcctggaggggattagctatgcgctggatagcacagacattctgcgtagcgtgttactgaagcagccagagaagctcaataccgcttactggcgcgccacccgcaaactgcgtttaaaactcttcggcaagatagtaaaaagccgatgcctgaccgcaccggctttaagaaagtggattatgcgcagtggtgtggcacatattccacagttgaaggattaaccaacgcgcttcacatcgcccaccagcaggatataagagagcgcgccaatcaacgcgacggcggagatataaaccagtgcaggtgcgaaaccgtaaccctgcgccaggtaccccaccaccagcggaacggtgatgccgcccagaccaccggcgaagttaaacacgccgccggttaaaccaatcaggcgcatcggtgccagagaagaaaccaggctccaggtaatgctagcaaaaccgttaccgaagaatgccagcgccatcaggcacataatcatcatcggatcgttagtgtagttagcgcccataatgcaggtggagatcagcaagccgcagataatcggcgttttacgcgcaaagcccagactaaagcccttacgtaccagcagatccgctacccagccagagagcaggacgccgacaaacgccgcgaggaatggcaccgtggtcataaagcctgctttcagcgccgtgattcctttttcctgggttaaatagttcgggaaccaggttaagaaaaaccacagtgtagaagccaccgcaaattgcccaagataaacgccgatcagtttacgatggaacaccagtttccagtctttggctgttaacggctgacgcgcctctttcttcaccggcgcatcaccatccaccagaccgccgccatcacgaatgtaatccagttcagctttgctgatacctttggtcaggcgcggcggctgataaaccttaaaccaaatcaggctccagataatgccgataccaccagtgacaatgaacacccagtgccagctcaacatctcctgaatccagatcagcagcggcgtcagaaacgccagaccgacaaactgaccagacgtataaaaaccaacggcagaagcgcgttcatgttccgggaaccagctggtcaccatccggttattggtcgggaaagcaggcgcttcgaaaataccggttatcgcgcgcagaccaattaaactcattaagcccgtggcaaagccctggaataaagtcgccacactccagccaaatatcgcaataaaataagtcacgcgagaacctacgcgatctaaaaaccaaccgccggggatctgacatagcgtataaagccaggcgaaggcgctaaatacatagcccatttccgctttggtaatgccgaactcttcctgaatatgggcggaagccacggccaggttggcgcggtcgacataacaaatgactaccgtaataaagatcatcaccagcgtcagataacgccgacgccccggctttgctgcattaacgggaatatccatagcgagctttctccagattttgggcatagcgaagccgctcaccatgccctgtaatttacagagggttatatttttgtattgctgttttagtgcccgatgaggggcttacgtggcaggaattaccactctgctacgctgttatcttcatgacgccagagcggattacgccagtccggggcatttttactgaactcaatcactttagcttcgtcgatttccacgcctaagcccggtttcgttaacggtttaaagaagccgccgaccatgctgaagtcttctttgtttttcacaaagtcgagtaactccgcgcctttgttgtaatgaattcccatactttgttcctgaagtacggcgttataggaaacaaagtcgatatgcaggcaagccgccagtgcaatcggtccgagcggacagtgcggcgcaagggtcacgtcataggcttctgccattccggcgattttgtagcattcggtaataccgcccgcgtgggagagatccggttgcagaatgctaataccacctgcctccagcacgcgtttaaaatcgaagcgactgaacatgcgttcacccgccgccagtggaatatgcgtttgtgccgccagtttcgggtagtattcggcttgttccgccagcaccggctcctcaataaacagcgggcgatacggctccagttctttaatcagcactttcgccatcggcgcgctgacgcgaccgtggaaatcaagaccaaactcaatctgattgccaaaagcttcacgaatttgtgccacggtgttaaccgccgcatctaccgcgcgggagttatcaattagccccagttcttcacaaccgttcagtttgaaggtatcgaagccgatttcgcgtagcgttttaatgccgtcgataacatccgccggacgatcgccgccaacccaactgtaggctttaattttgtcgcgaaccaggccgcccatcagttgccagaccggcgcattcagcactttacctttgatatcccataacgcctggtcaatcccggcgatggcgctcatcaggatcggaccgccgcgatagaatccggcgcgatacatcacttgccataagtcattgatgcggcttggatcctgaccaatcaaatagtcacccagctcgtgaactgccgcttccaccgtacgggcgcggccttcgatcacgggctcgccccaaccgaccacgccttcatcggtttcaattttcaggaacatccagcggggaggtaaacgatacgtggtaattttggtgattttcattgcactgcctctcgatacgccttaacaaatgctgctgcctgctgcgcggtgcgctctacggattgcccggcgcgatagagatcgctgcctaagcccgcccctgcacaacctgcgtctatccactgcgccaggttttctggcgtcacgccgccaacggcaaagactgcgatgtcgcttggcaataccgcttttaacgctttgatgtattgcggaccaaaagcgctactcggaaatattttcagcgcctgcgcgcccgcttcgagcgcggtaaaggcttcggtcgccgtcgcgcagccggggcagacggtcatgccgtagcccaccgcacggcggatcacttcactatggatattgggcgtaacgatgagctgacagcccatcctggcgagcgcatcgacctgttcaggtttcagtaccgtacctgcgccaatcaacgccttgtcgccgtacgcatcaacgatggcgggaatgctttgctcccattgtggggaattcagcgggatttcaaccgcgtcgaacccggcgtcaatcaccgcgccaacatgcgccagcgcctcgtcgggcgtaataccgcgcaaaatggcgatcagcgggagtttagtttgccactgcatgagcgatgctccttataccagcctgaaatgccgtgtcgcccgccaccgccgtcacgtcgcaacccatcgcctgaaaggcttgctggtagcgcgcggtcaggcttgttccggcgacaagggtgatggcgtgttgatgggccacatagtcgcgcatactggcgacctctgcgccaatcaacaaaccagagagaaattcgctgacctgttcgcggggaagtgttcccagcacatggctggcgcgaacttcaaaaagctgcggcaatatggcgggcgtattaagaccacgctcaaggccagctgtgaaggcatcggcagagttttcctgcggcggcaaacctgcgccaatcaaactgtgatttaacagtaaatgatgtaattcaccggtcatcacggtgcgaaaatcgttgatttgctggctatcggcctgcacccatttgcaatgggttccgggcatgacataaagagaggaaggagccagagctcgcgcgccgatcaattgtgtttcttcgccgcgcatcacattgtggttatcgtcatgagagacacataatccgggaataatccagatattgtcgccaacactcgttaattgttcgccaatagagctaaaacaggcaggaacagataaatacggtgcaactttccagccgacgttgctgccaaccattcctgccattaccactggcgttttctcttcacgccagtcggtcgtgacttctgctaacaccgcagccggagattttccgttcaggcgcgtgacgcctgcttcactttgcctgctctccaggcagtggtcgccctgataaagccaggcgcgcagattggtgcttccccagtcaattgcgatgtagcgagctgtcatgtgatttcctttaaccttcgtgtgctgctggcgatcatggtaagcgccgcctgctctgccgcatcgccgtcctgatgtcgtatcgcatcgaacagcgccttatgttcctggagcgtttgcggcatgttggcctcatcgcccatccaggttcgttcaaaaaccgcccgctgcaggctactgatcgcaatgctaagttgctgtaacaccgggttatgcacgctctgcagcaccgcctcgtggtagcgaatatccgcttcgttaaacgcttcgcggtcctgattgttggcaatcatctcgttcagcgcgctttcaatctgcgccagatcgctggaagtcgcgcgctctgctgcccaacgggcaatcgccggttccaccagatttcgcacttcgctcatggcactgataagccgtgggtcgtagtcattttccagcacccattgcagtacgtcagtgtcgaggtaattccactggttacgcggtgccacaaacgccccgcgataacgtttcatttcaatcagccgcttcgccatcaggctacggaacacctcacggatgatgttgcggctggttgcaaactcctcacagagttccgcctcagccggaagcgggctgcctggcacgtatttgccgtgaacgatctgtttacccagcgtaatgacaatgcgatcggttttattgagagtcatggagagtccttgtgctctgtatgttcttctctactttaccccgatcgatgcataacgcggcaactttgtagtaccagcgtgatgacgttcgcgtttgccgtgcgtgtaatgtagtacaaacttatattgttgtactacaatttagatcacaaaaagaacaatgcataaaaaaatgacatgcgtcgggcagaaatctgaaaagggatatcaggcgctaaacaggagggaaagaagagtatgctttcaacggcttagctactcgtttaaaggattaatcatgaagttgaattttaagggattttttaaggctgccggtttattcccactggcgctgatgcttagtggctgtatcagctatgctctggtttcccataccgcaaagggtagtagtggaaagtatcaaagccagagtgacaccatcactgggctaagccaggcaaaagatagtaatggaacaaaaggctatgtttttgtaggggaaagcctggattaccttatcactgatggtgccgatgacatcgttaagatgctcaatgatccagcacttaaccggcacaatattcaggttgccgatgacgcaagatttgttttaaatgcggggaaaaagaaatttaccggcacaataagcctttactactactggaataacgaagaagaaaaggcactggcaacgcattatggttttgcctgtggtgttcaacactgtaccaggagtctggaaaacctaaaaggcacaatccatgagaaaaataaaaacatggattacagtaaggtgatggcgttctaccatccatttaaagtgcgattttatgaatactatagtcccagaggcattccggatggtgtttccgcagcattactgccagtgactgttacgctggacatcattactgcaccgctgcaatttctggttgtatatgcagtaaaccaataatcagtaagcgggcaaacgcgtttatgctgtttgcccgcccacagattaattcagcacatacttctcaatagcaaacgccacgccatcttcaaggttagatttggtgacaaagttcgccacttctttcacactaggaatagcgttatccatcgccacaccgacgcctgcatattcaatcattgcgatatcgttttcctgatcgccaatcgccatgatttcttccggtttaatacctaacacgtcggccagacttttcacccccgtacctttgttaacgcgtttatcgaggatttcgaggaagtacggcgcacttttcagcacggtatatttctctttcacttcctgcggaatacgcgcgatagcctggtcgaggatggcgggttcatcaatcatcatcactttcaggaactgggtattggggtccattttctccgcttcgcagaacaccagcggaatggtggcaacgaaggattcatgcaccgtgtagtagctgatatcacggttggcggtgtacagcgtggtgcggtccagggcgtggaaatgagaaccgacttcgcgagagagtttttccaggaaacgatagtcgtcatagctgagagcagtttgcgccacggtgctaccatcagcggccttctgtaccagcgcgccgttataagtaatgcagtagtcgcccggctgttccatatgcagctctttcaggtagttgtgcacacctgcatacgggcgacccgtcgttagcacgacattcacgccacgggcgcgagctgcggcaatcgcatttttaacggcgggactaatggtgtgatcgggcagcagaagggtgccatccatatcgatagcaatgagtttaatagccatgagttccccaggtagattggttcctgacccatgctaacgcgattccgctcaaaaatcagtacaacacccgagggaaaagggggatgcaacgcgcgttgcgtgctccctttttgcttagcggaagagtttccctttcagcagttccatgcctgcggaaagcagatcgttattggcttgtggactcacttcaccttgcggactgagcgcatcaataatcttcggcaattgttctgccagtaaactggaagctgtactggtatccacgccaagtttttgcccgagatcggacaccgcatttgtgccgagcgcgctttccagttgctcgccactaacgctttgattgccctgttgattactcagccaggtactgagaatggcccctaagccgccactttgcagtttttccagcagcacctgaatgccgccctgctcctcaacccaacttaaaatagcctgatatttccccgcatcgcctttcagaaaggcaccgacaacttcatcaaaaagccccatgataatcacctgtaaagcgttacgtgttgacccaaaaagtatagatttgcgggatgataattgcggattgcagaaataaaaagggcggagatgatctccgcccttttcttatagcttcttgccggatgcggcgtgaacgccttatccggcctacaaaatcatgaaaattcaatacattgcaagattttcgtaggcctgataagcgtagcgcatcaggcacgctcgcatggttagcgccattaaatatcgatattcgccgctttcagggcgttctcttcaataaacgcacggcgcggttcaacggcgtcgcccatcagcgtggtgaacaactggtcggcagcaatcgcatctttaacggtaacgcgcagcatacgacgactttccgggtccatagtggtttcccacagctgttccgggttcatctcgcccagacctttataacgctggatggagaggccgcgacgggactctttcaccagccagtccagcgcctgctcgaagctggctaccggctgacgacgctcgccacgttcgataaacgcatcttcttccagcaagccacgcagtttctcacccagcgtgcagatacgacgatattcgccaccggtgataaactcgtgatccagcggatagtcagtatccacaccgtgggtacgcacgcgaacaatcggctcgaacaggttttgctcagcattggtgtgaacatcaaacttccactggctgccgtgctgttctttgtcgttcagttcgctgaccagcgcgttcacccagcgggtaacggtctgctcatcagaaaggtcagcttccgtcaacgtcggctgatagataagctctttcagcattgctttcggataacgacgctccatacgattgatcattttctgcgtcgcgttgtactcagataccagtttctctaacgcttcgccagccaatgccggtgcactggcgttggtgtgcagcgttgcgccgtccagcgcgatagagatctggtactgatccatcgcttcgtcgtctttaatgtactgttcctgcttgcctttcttcactttgtacagcggcggctgagcgatgtagacgtgaccgcgttcaacgatttccggcatctgacgatagaagaaggtcaacagcagcgtacgaatgtggctgccgtcgacgtccgcatcggtcatgatgatgatgctgtgataacgcagtttgtccgggttgtactcgtcacgaccgataccacagccaagcgcggtgataagcgtcgccacttcctgagaagagagcatcttatcgaagcgcgctttctcgacgttgaggattttacccttcagcggcagaatcgcctggttcttgcggttacgcccctgcttcgcagagccgcccgcggagtccccttccaccaggtacagttcggaaagcgccggatcgcgttcctggcagtctgccagtttgcccggcaggcccgctaagtcgagcgcacctttacggcgggtcatttcacgcgcgcgacgcgccgcttcacgggcacgggcagcatcgataattttgccaaccacgattttcgcgtcggttgggttttccagcaggtattctgccagcagttcgttcatctgctgttcaaccgcgcttttcacctcagaagaaaccagtttgtctttggtctgggaggagaatttcgggtccggcactttcacggaaacgaccgcaatcaggccttcacgcgcatcgtcaccggtggcgctgactttggcttttttgctgtagccttctttgtccatgtaggcgttcagggtacgggtcatcgccgcacggaagcctgccaggtgagtaccgccgtcacgctgcggaatgttgttggtaaagcagtagatgttttcctggaagccatcgttccactgcaacgccacttcgacgccaataccgtctttttcagtggagaagtagaagatattcgggtggatcggcgttttgttcttgttcagatattcaacgaacgccttgatgccgccttcatagtggaagtggtcttctttgccgtcgcgcttgtcgcgcagacgaatggaaacgccggagttgaggaagctcaactcacgcagacgtttcgccagaatttcatattcgaactcggtcacattggtgaaggtttcgaggctgggccagaaacgcaccatggtgccggttttttcagtctcgccggtaaccgccagcggggcctgcggtacaccgtgttcgtagatctgacggtgaattttaccctcgcgctggataaccagctccagtttttggctcagggcgtttactacgctaacaccaacgccgtgcagaccgccggacactttataggagttatcgtcaaatttaccgcctgcgtgcagaacggtcatgatcacttccgccgcgcttacgccctcttccgggtgaataccggtcggaatgccgcgcccgtcatcctgtacagagacagagttatcggcgtgaatggtgacgataatttctttacagtgacccgcgagcgcttcgtcgatagcgttatctaccacctcgaataccatgtggtgcagaccggtgccgtcatccgtgtcgccgatatacatacccgggcgcttacgcaccgcatccagccctttcaggactttgatactggaggagtcataagaattgctcatcaacgtttctcgctcatttatacttgggttaatccgttattttacccttttccacggtaaacatcttgctattttcgtcgctcatgtctataacgtgttcagcactgatcgcgctgacaaagacctgactttgcgtcgcttttaagcggctggcaagcagcccgcgacgctcatcatcaagctcagaggcaaaatcatctatcaggtagagacaccgccgcccgctttcacgggtgaggaactctccttgcgccagacgtaaggcgcacatcaacagcttaagctgcccacggcttaaggtatcttccaccggcgcaccgtcggcgcgaatgcgtaagtccgctttgtgcgggccgtgcgcggtgtaggttagctggcgatcgcgttcaaaattacgttccagcacctcagcatattctgtctctttctcccagccgcgctggaaagagaaagtcagagaaaactcagggagaaattgcttacaggtatcagccatatcggccgcgataccggcgctatactccgcgcgccaggtgctgatttgctccgccagcgggatcagctctttatcccacgggcgtagctgttcgtaacgtgtcacctggcgcagcgccgcattgcgctgcttgagcaatcgcttgagattgctccaggcggtgaaaaatccgggttcgttgtgaaagcatccccagtcgaggaatgctcttctgtatttggggccgccgttgagtaaagtaaacccttctggcgttatcaactgcattggcatcaggtgcgccagttccgcgaccttatgcccgtctgtaccgtcgatgcggactttgctgtcgccctgtttgtctttggttaagccaatcgctgtctcgcgctcttcgccctgtaatcgcccgtggagaacaaacgcctcctgctcatggcgaatgacgcgaccaatctgcaaactgcgaaacgcccgaccatggccgagcgtatagatggcttccagcacgctggttttgccactgccgttggcgcctaccagaaagttaaagccgggagataaggcgagatccgcggtttcaatgttgcggaaatcgcggatcaacaagcgggtgagggacattacagtctcattggcatgacaacataagccgcgctctggctggccgcatcttcaatctgcacgctggaaacgctatcggtcagcatcatgcggacgttttcgcatttcagcgcgttcagaacatccagcacataactgacgttgaagccgatttccatctccgcaccgctataggtaacgtcgaggatctcttccgcttcttcctgttccgggttgttggcggtgattttcagctggttttcgctgacataaagacgtacgccgcggaatttctcgttagagagaatcgccgcgcgagcaaacgcctgcttgagcagatcgcagccagcttccagatgtttgtccgggttcttcggcagaacgcggcgataatccgggaagcgaccatccaccagtttggaggtgaagataaagtcgccaacgtgggcgcgaatgttgttgctgccaatctgtacgcgcagcggattgtcgccgccgtcgagcatacgcatcagttcaatcacgcctttacgcggtacgatcacgctatggcttggcaaagattgaccaattggcatactacagaccgccagacggtggccgtcggttgccacggtgcgcagttcttcaccttcggtttcaaacagcataccatttaagtaatagcgaacgtcctgatgcgccatagaaaactgggtcgcttcaatcagacgcttcatcgttgcctgcggcagggtaaattcgacttcactctgccagtcatcgaggttcgggaaatccgccgctggcagggtagacaggctaaaacggctacgcccggagcgtaccagcatccgttcaccttccagctgcacggcaatttccgcgccttcaggcagaccacggcagatatcaaagaatttgcgcgccggaacggtcgtcgctcctggctcgtgtggctgaaccagcgcaacacgtgccaccatttccatctcgagatcagtaccggtcaggctcaacgtaccgtcagcaacctgtaacagcagattaccgagaatcggtagcgtaggacgaccacctaacggaccgctcacctgttgtagcggttttaataaatgctcacgttctacggtaaatttcataggtttagctactcaatgttctgattaaattactaaaatcttctttgatatcgtggctctcttcacgcaactgctcgatcttacggcaggcatgaagcaccgtcgtgtggtcacggccaccaaacgcatcgccaatctccggcagactgtggttagtcagctctttcgccagcgccatcgccatctggcgcggacgcgccacgctgcgggatcgacgcttggaaaggagatccgcgactttgatcttgtagtactccgccaccgtcttctgaatattgtcgatggtgaccagtttttcctgcaatgccagcaagtcgcgcagcgcctcacgcacgaagtcgatggtgatcgcccgtccggtaaagttggcattggcaatgacgcggttcagcgccccttccagctcacgtacgttagatcgtagacgcttggcgataaagaacgccacttcgcccggcaaacgaatgtcgttttcgtcggcctttttcatcaggatcgccacacgggtttccagctctggcggttcgatcgccacagtcagtccccaaccgaagcgggatttcaaacgatcctcaacgccgttgatctctttcggatagcgatcgctggtgagaatgatctgttgattaccttccagcagggcgttgaaggtgtggaaaaactcttcctgagatcgttctttattagcaaaaaactgaatatcgtcgatcagcagtgcatctacggaacggtagtagcgtttaaactcttcgatcgcgttgttttgcagggctttaaccatgtcctgaacaaagcgctcggagtgcatataaaccactttggcattcggcttgcgcgccataatgccgttacccaccgcatgcagcaggtgagttttacccagacccgtgccgccataaaggaacaacgggttataggcaccgccagggttatccgccacctggcgagccgccgcgcgcgccagttggttagatttaccttcaacgaagttatcaaacgtgtgtttgacgtttacgttagaacgataggtcggttctgccggggccgggacgttatcccaaccactgcgcgtagaaggcgcagcacgttgcggctgcgtttgcgccacctgtgcaggggccgcgacgttgctcgtcactgccgcttgtggcgtttgcgtcaccggtttggtgccgacttcaaaacgcagctgtggggcatccgctccgcagaaactggttagcagtccattgatattattaaggtacttgtcccgtacccaatcgaggacaaaacggtttggcgcgtacagggccagcgtgttatcgctcagttccgcctgcaatgggcgtatccacatactgaattctgtggctggtaactcatcctgcaatcgggcaagacactgctgccaaaggctaagactcacggcggactccactcgaacaaaagtcgataatgactaaggctgaaacattcatgattgttgacgtacgtcgaaaagaccctgcttgagggtgacgcacgaaccgctgtctgcggttatatgcccgatcaagatcctgcaaaacgatcgggaccgcggatcatagcctaaactgcgcaagagatcttctgtttctcacagattttcccgatttatccacaggactttccagaactcgctaagtgtaaacgatcctgccgcgaggcgggcacgatttacgccgcatattggaaaatttaatgaccatagacaaaaattggcttaatcgatctaataaagatccaggacgatccttgcgctttacccatcagcccgtataatcctccacccggcgcgccatgctggtttccactggtgtgaggtcgtacattttccctgcgaaaaggtgcggaaaagcgcggtaaataaggaaagagaattgactccggagtgtacaattattacaatccggcctctttaatcacccatggcttcggtgtccatcgtttcatttttcggcggatatccaataaagccattgaatttattcaagtttaggtagaaatcgccatgaaacgcacttttcaaccgtctgtactgaagcgcaaccgttctcacggcttccgtgctcgtatggctactaaaaatggtcgtcaggttctggcacgtcgtcgtgctaaaggccgcgctcgtctgaccgtttctaagtaataaagctaacccctgagtggttaagctcgcatttcccagggagttacgcttgttaactcccagtcaattcacattcgtcttccagcagccacaacgggctggcacgccgcaaattaccattctcggccgcctgaatagcctggggcatccccgtatcggtcttacagtcgccaagaaaaacgttcgacgcgcccatgaacgcaatcggattaaacgtctgacgcgtgaaagcttccgtctgcgccaacatgaactcccggctatggatttcgtggtggtggcgaaaaaaggggttgccgacctcgataaccgtgctctcagcgaagcgttggaaaaattatggcgccgccactgtcgcctggctcgcgggtcctgacttaatcggaagcgttggaaaaattatggcgccgccactgagccctggcagccgggtcctgatagccctcattcgggtctatcaacgcctgattagtccgctactcgggccgcattgtcgtttcactccaacctgtagtagctacggaattgaggcattgcgcaggtttggagtgataaaaggcagttggttgacggtgaaacgcgtattaaaatgccaccctttacaccctggtggtgacgatcccgtcccgcccggaccatttgataccagagaacactaacgatggatagccaacgcaatcttttagtcatcgctttgctgttcgtgtctttcatgatctggcaagcctgggagcaggataaaaacccgcaacctcaggcccaacagaccacgcagacaacgaccaccgcagcgggtagcgccgccgaccagggcgtaccggccagtggccaggggaaactgatcagcgttaagaccgacgtgcttgatctgaccatcaacacccgtggtggtgatgttgagcaagctctgctgcctgcttacccgaaagagctgaactctacccagccgttccagctgttggaaactagtccgcagtttatttatcaggcacagagcggtctgaccggtcgtgatggcccggataacccggctaacggcccgcgtccgctgtataacgttgaaaaagacgcttatgtgctggctgaaggtcaaaacgaactgcaggtgccgatgacgtataccgacgcggcaggcaacacgtttaccaaaacgtttgtcctgaaacgtggtgattacgctgtcaacgtcaactacaacgtgcagaacgctggcgagaaaccgctggaaatctccagctttggtcagttgaagcaatccatcactctgccaccgcatctcgataccggaagcagcaacttcgcactgcacaccttccgtggcgcggcgtactccacgcctgacgagaagtatgagaaatacaagttcgataccattgccgataacgaaaacctgaacatctctagcaaaggtggttgggtggcgatgctgcaacagtatttcgcgacggcgtggatcccgcataacgacggtaccaacaacttctataccgctaatctgggtaacggcatcgccgctatcggctataaatctcagccggtactggttcagcctggtcagactggcgcgatgaacagcaccctgtgggttggcccggaaatccaggacaaaatggcagctgttgctccgcacctggatctgaccgttgattacggttggttgtggttcatctctcagccgctgttcaaactgctgaaatggatccatagctttgtgggtaactggggcttctccattatcatcatcacctttatcgttcgtggcatcatgtacccgctgaccaaagcgcagtacacctccatggcgaagatgcgtatgttgcagccgaagattcaggcaatgcgtgagcgtctgggcgatgacaaacagcgtatcagccaggaaatgatggcgctgtacaaagctgagaaggttaacccgctgggcggctgcttcccgctgctgatccagatgccaatcttcctggcgttgtactacatgctgatgggttccgttgaactgcgtcaggcaccgtttgcactgtggatccacgacctgagcgcacaggacccgtactacatcctgccgatcctgatgggcgtaacgatgttcttcattcagaagatgagcccgaccacagtgaccgacccgatgcagcagaagatcatgacctttatgccggtcatcttcaccgtgttcttcctgtggttcccgagtggtctggtgctgtactatatcgtcagcaacctggtaaccattattcagcagcagctgatttaccgtggtctggaaaaacgtggcctgcatagccgcgagaagaaaaaatcctgattcggtgagttttcgctaaaataagggcggtcagttgaccgccttttttcttttcgtagggcggataagcaccgcgcatccgccacacaaagcaacaggaacatcatgagcgataatgacactatcgtagcccaggccacgcctccgggacgtggcggcgttggcatcctgcgcatctccggcttcaaagcccgtgaagttgccgaaaccgtgctgggtaaactgcctaagccgcgctacgccgattatcttccgtttaaagacgccgacggcagcgtgctcgatcaggggattgcgctatggttccctggcccgaacagcttcaccggcgaagatgtgctggaactgcaaggtcatggcggtccggtgatcctcgacctgctgttaaaacgcattctgaccattcccggcctgcggattgctcgccctggtgagttttccgaacgcgcgtttcttaacgataaacttgacttagcccaggccgaggcgattgccgatcttatcgacgccagtagcgaacaggcggcccgtagcgcacttaacagcctgcaaggcgcattctccgcacgggttaatcatctggtagaagccctcacccacttgcgcatttacgtcgaagcggcaattgatttccccgatgaagagatcgatttcctctccgacggaaaaattgaagcccagctcaatgacgttattgccgatcttgatgcagtgcgtgctgaagcacgtcagggtagtttgttgcgcgaagggatgaaagtggtgattgccggacgtcctaacgccggtaaaagcagcctgttaaacgcgctggcggggcgtgaagcggcaatcgtaaccgatatcgccggaactacgcgtgacgtgctgcgtgagcatatccacattgacggaatgccgctgcatatcatcgataccgccgggctacgtgaagccagtgacgaagtagaacgtattggtatcgagcgcgcgtggcaggaaattgaacaggccgaccgcgtgctgtttatggtcgatggcaccacaacagacgccgtggatccggcagagatctggccggaatttattgcccgtctgccagcgaaactgccgatcaccgtggtgcgcaataaagccgatatcaccggcgaaacgctgggaatgagtgaagtgaacggtcacgcgttaattcgtctcagcgcaaggactggtgaaggcgtggacgtgctgcgtaaccatctcaaacagagcatgggctttgacaccaacatggaaggcggcttcctggcgcgtcgtcgccacctacaggcgctggaacaggcagcggaacatctacaacagggcaaagcgcaactgttgggagcctgggcaggtgaactgctggcggaagagttgcgtctggcacagcagaacttaagcgaaatcaccggggaatttactagtgacgacctgctggggcggattttctccagcttctgtattggtaagtaaccgcgcttacgaggccgcattctgactgtcagatgcggcttcgcttcattgttaccactcctgttattcctcaaccctttttttaaacattaaaattcttacgtaatttataatctttaaaaaaagcatttaatattgctccccgaacgattgtgattcgattcacatttaaacaatttcagaatagacaaaaactctgagtgtaataatgtagcctcgtgtcttgcgaggataagtgcattatgaatatcttacatatatgtgtgaccagtaaatggttcaatattgacaacaaaattgtcgatcaccgcccttgatttgcccttctgtagccatcaccagagccaaaccgattagattcaatgtgatctatttgtttgctatatcttaattttgccttttgcaaaggtcatctctcgtttatttacttgttttagtaaatgatggtgcttgcatatatatctggcgaattaatcggtatagcagatgtaatattcacagggatcactgtaattaaaataaatgaaggattatgtaatggaaaactttaaacatctccctgaaccgttccgcattcgtgttattgagccagtaaaacgtaccactcgcgcttatcgtgaagaggcaattattaaatccggtatgaacccgttcctgctggatagcgaagatgtttttatcgatttactgaccgacagcggcaccggggcggtgacgcagagcatgcaggctgcgatgatgcgcggcgacgaagcctacagcggcagtcgtagctactatgcgttagccgagagtgtgaaaaatatctttggttatcaatacaccattccgactcaccagggccgtggcgcagagcaaatctatattccggtactgattaaaaaacgcgagcaggaaaaaggcctggatcgcagcaaaatggtggcgttctctaactatttctttgataccacgcagggccatagccagatcaacggctgtaccgtgcgtaacgtctatatcaaagaagccttcgatacgggcgtgcgttacgactttaaaggcaactttgaccttgagggattagaacgcggtattgaagaagttggtccgaataacgtgccgtatatcgttgcaaccatcaccagtaactctgcaggtggtcagccggttagtctggcaaacttaaaagcgatgtacagcatcgcgaagaaatacgatattccggtggtaatggactccgcgcgctttgctgaaaacgcctatttcatcaagcagcgtgaagcagaatacaaagactggaccatcgagcagatcacccgcgaaacctacaaatatgccgatatgctggcgatgtccgccaagaaagatgcgatggtgccgatgggcggcctgctgtgcatgaaagacgacagcttctttgatgtgtacaccgagtgcagaaccctttgcgtggtgcaggaaggcttcccgacatatggcggcctggaaggcggcgcgatggagcgtctggcggtaggtctgtatgacggcatgaatctcgactggctggcttatcgtatcgcgcaggtacagtatctggtcgatggtctggaagagattggcgttgtctgccagcaggcgggcggtcacgcggcattcgttgatgccggtaaactgttgccgcatatcccggcagaccagttcccggcacaggcgctggcctgcgagctgtataaagtcgccggtatccgtgcggtagaaattggctctttcctgttaggccgcgatccgaaaaccggtaaacaactgccatgcccggctgaactgctgcgtttaaccattccgcgcgcaacatatactcaaacacatatggacttcattattgaagcctttaaacatgtgaaagagaacgcggcgaatattaaaggattaacctttacgtacgaaccgaaagtattgcgtcacttcaccgcaaaacttaaagaagtttaattaatactacagagtggctataaggatgttagccactctcttaccctacatcctcaataacaaaaatagccttcctctaaaggtggcatcatgactgatcaagctgaaaaaaagcactctgcattttggggtgttatggttatagcaggtacagtaattggtggaggtatgtttgctttacctgttgatcttgccggtgcctggtttttctggggtgcctttatccttatcattgcctggtttagtatgcttcattccgggttattgttattagaagcaaatttaaattatcccgtcggctccagttttaacaccatcaccaaagatttaatcggtaacacctggaacattatcagcggtattaccgttgccttcgttctctatatcctcacttatgcctatatctctgctaatggtgcgatcattagtgaaacgataagtatgaatttgggttatcacgctaatccacgtattgtcgggatctgcacagccattttcgttgccagcgtattgtggttaagtagcttagccgccagtcgtattaccagtttgttcctcgggctgaagattatctcctttgtgatcgtgtttggttcttttttcttccaggtcgattactccattctgcgcgacgccaccagctccactgcgggaacgtcttacttcccgtatatctttatggctttgccggtgtgtctggcgagttttggtttccacggcaatattcccagcctgattatttgctatggaaaacgcaaagataagttaatcaaaagcgtggtatttggtagcctgctggcgctggtgatttatctcttctggctctattgcaccatggggaatattccgcgagaaagctttaaggcgattatctccagtggcggcaacgttgatagcctggtgaaaagcttcctcggcaccaaacagcacggcattatcgagttttgcctgctggtgttctctaacttagctgttgccagtagcttctttggtgtcacgctggggttgttcgattatctggcggacctgtttaagattgataactcccacggcgggcgtttcaaaaccgtgctgttaaccttcctgccacctgcgttgttgtatctgatcttcccgaacggctttatttacgggatcggcggtgccgggctgtgcgccaccatctgggcggtcattattcccgcagtgcttgcaatcaaagctcgcaagaagtttcccaatcagatgttcacggtctggggcggcaatcttattccggcgattgtcattctctttggtataaccgtgattttgtgctggttcggcaacgtctttaacgtgttacctaaatttggctaaatccttcaagaagccagccattcgctggcttcttgcctctcaggaaatcacttatgtccaaatggcaactcgcctgatcctccttcaccacgtatgctttgcgtcaccttactatcaggacgctttagcccatgtcccgctttttgatttgtagttttgccctggttttactttatcccgccgggattgatatgtacctcgttggtttaccgcgcatcgccgccgatctcaatgccagcgaagcgcagttgcatattgcgttctccgtatatctggcggggatggcagctgcgatgttatttgccggtaaagtggccgatcgtagtgggagaaagccggtcgccatacccggcgcggcgctatttattattgccagcgtgttctgtagtctggctgaaaccagcacgttatttcttgcaggccgatttctacaggggttgggcgcaggctgttgttacgtagtggcgttcgctattttgcgcgacacgctggatgatcgacgtcgggctaaagtgctgagtttactcaacggtattacctgcatcattccggtgttagcgccagtgctcggacatctgattatgcttaaattcccgtggcagagtctgttctgggcgatggcaatgatgggcatcgcggtactgatgttgtctttgtttattttaaaagaaacgcgcccagcggcccccgcagctagcgataaaccacgagaaaatagcgagagcctgcttaaccgttttttcctcagccgtgttgttatcaccaccctcagcgttagcgtgatcctcactttcgtcaacacgagtccggtattgctgatggaaatcatggggtttgagcgcggtgaatacgccaccattatggcgctgaccgctggcgtcagcatgaccgttagtttctccacgccatttgcgctgggaatttttaagccacgtacgttgatgatcaccagccaggtgttattcctggcggcggggatcactcttgccgttagtccttcccatgcggtttctctgtttggtatcacgctgatttgcgccggtttcagcgtaggttttggtgtggcgatgagtcaggcgttagggccgtttagtttacgcgcgggcgtagccagcagcaccttaggtattgcgcaggtttgcggtagcagtctgtggatttggctggcagcggtggttggtatcggcgcatggaatatgctgatcgggattctgattgcctgtagcatagtgagcctgttgctgattatgttcgtcgcgcctggacgccccgttgccgctcatgaagaaatccatcaccacgcttgatctcaatctgctgctttgtctgcaactgctgatgcaggagcgcagcgtaaccaaagcggcgaagcggataaacgtgacacctagcgcggtgagtaagagcctggcaaagttaagagcgtggtttgacgacccgctctttgtgaacagtccgctgggtctgagccccacaccgctgatggtcagcatggagcaaaatctggcggagtggatgcaaatgagcaacctgctgctggataaaccgcaccaccagacaccgcgcggcctgaagtttgagctggcggcggaaagtccgctgatgatgatcatgcttaatgcgctgagcaaacagatctaccaacgttacccgcaggcgaccatcaaattacgtaactgggattacgattccttagatgccattactcgtggtgaagtggatatcggtttttccggtcgcgaaagccatcctcgcagccgggagctgttaagcagcctaccgttagccattgattatgaagtgctgtttagtgatgtgccctgcgtctggttacgcaaagatcatccggcactgcatcaaacgtggaatctggacaccttcttacgttatccgcatatcagcatttgctgggaacagagcgatacctgggcgctggacaatgtgttacaggagctgggacgcgaacgcacgattgctatgagcctgccggaattcgagcagagtctgtttatggcagcgcaacccgacaatctgctactggcgaccgcgccgcgctactgtcagtactacaatcaactccatcaactgccgttggttgctcttcctctcccgtttgacgaaagccagcaaaaaaagctggaagttccttttaccctgctgtggcataaacggaacagccataatccgaagatcgtctggttacgggaaaccattaaaaacctttacgcgagcatggcataaccgaatcgtatgaaacgcgacccaatttcacaataaaatgtaaaaaagttgtaataagcttgtctgaatcgaacttttagccgctttagtctgtccatcattccagtaaatgattactcttgtattcataatggaccattaagcatggagcgaaaaatggcgactcactttgcccgagggattttaacggaaggacatctgatttctgttcgtctcccctcccagtgtcatcaagaagcccgaaacattccccctcatcgtcaaagccgttttctggcgtccagaggtttactcgcagaactgatgttcatgctgtatggcattggcgaattgccggaaatcgtcaccctgccgaaaggtaaaccggttttcagtgataaaaatttgcctagcttttccatttcctatgccgggaatatggttggcgtggcgttaacaaccgaaggtgaatgtggcctcgatatggaactacagcgtgcgacgcgcgggtttcatagcccacacgcgcccgataaccacaccttttccagcaatgaaagcctatggatcagtaaacaaaacgatcctaacgaagcgcgggcgcagctcatcacgctgcgccgaagcgtgctaaaactaaccggtgatgttttgaatgacgatccgcgcgatctgcagctgctgcccattgccggacgcctgaaatgtgctcatgtaaatcatgtagaagcgttatgcgacgcggaagacgtgctggtgtggtccgtggcggtcacgcccacgattgaaaagctcagtgtctgggagttagatggcaaacacggctggaaaagcctgccggatattcacagccgcgccaacaatcctaccagccggatgatgcgttttgcccaactctctaccgtgaaggcttttagcccaaattgatagacaaccacaggagtcatcatgtctgaaaaattgcaggtggttacgttactggggagcctgcgcaaaggcagttttaatggcatggttgcacgtaccctgccgaaaattgctccggcgagcatggaagtcaatgcgttaccatccattgccgacattcccttgtatgacgctgacgtacagcaggaagaaggttttccagcaacggttgaagctctggcggaacagatccgtcaggctgacggtgtggtgatcgtcacgccggaatataactacagcgtaccgggtgggctgaaaaatgccatcgactggctttcccgcctgccggatcaaccgctggccggtaaaccggtattgattcagaccagcagtatgggcgtgattggcggcgcgcgctgtcagtatcacctgcgccagattctggttttcctcgatgcaatggtgatgaacaagccggaatttatgggcggcgtgattcagaacaaagttgatccgcaaaccggagaagtgattgatcagggtacgctggaccacctgaccgggcaattgaccgcatttggtgagtttattcagcgagttaagatctaaataaaaaacccgccagcaatcatgcatggcgggtttttaacgcgctatcgattttagtgagcgtcgataaagacaatcttcaggataaacagcagcgcaacgatgattacgcacgggcttagatcacgcagacgtccggtaccgattttcatcacgcagtaggagataaagcccagcgcgataccttcggtaatgctgaagctgaacggcatcatcacggcggtaataaacgccggaacagattcagtaagatcctgccagttcacgcgtgccagactggaagtcatcagcacgccaacgtaaatcagcgcaccagctgcagcgtagcctggcaccatccccgccagcgggctcagaaagataaccagcaggaacagcagaccaacaaccactgccgtcagaccggtacgaccgccaacgcttacgccggaagaggactcaatataagccgtaacggaagaagtaccgataaagctaccggtcacggaagagatactgtcgacatacagcgcctgcttcatgcgcgggaatttccccttctcatccgccagacctgctttatcggtcacgccaatcagcgtaccggaggagtcaaacaagttgaccaacatgaaagagaaaatcacccctgccagcccgaggttaaagctcccggctaaatctacatgacccacaactgtcattacgctcggcggcgcagaaacgatgccattgtagtgcacatcacccagcatccagcccagcagcgtcgtcaccacgatagaaaccagcaccgctgcgtgaatgttgcggctggccagaatagcaatgatgaagaagccgaggatacccagaagtacgctgtgagaagtcagattaccgatgctcaccagcgtttccgggttagcgacaatcacacctgcgtttttcagccccatcatgccaatgaacagaccgataccgctggtaatacccacacgcagactcaccggaatgttggctatcatccagtagcgaacgcggaaaatcgtcagtaacagcagacctatcgcgccccagaagattgcgcccatcccgacctgccacggcaagcccatcgcctgtacaacgacaaaagcgaagaacgcattcaggcccatagcgggtgccagtgcaactggcaggttagcaaacagtcccatcataatactgccgaatgcagcgatcagacaggtagtgacgaagacggcgctggtatccatgccagcaacgccaagaatttgcgggttaacaaaaacgatgtaaaccatcgtcaggaaggtggtaaaaccggcgatcacttcggtccgtgccgtcgtgccatgttcgcgcagtttaaacacgcgttccagcatcccctgaccagaagtctgggtggtatgttgatgactcattatctatttccgaacaaggagggaaaatccgtcgctatcgtataccaaaatgcgacaataggcgcgtttgtgagagacttttttattggatttacttatacggcaacgattgcgttgcgcaaatcggctctacgaaaacgttaaactgattaaaaaggaaaggcatgtcccggatagaagcggtatttttcgactgcgacggtacgctggtcgacagtgaagtcatttgctctcgcgcatatgtaacgatgtttcaggaatttggtattacgctcgatcctgaagaggtattcaaacgtttcaaaggtgtaaaactgtacgaaattatcgatattgtttcccttgaacatggtgttacgttagcgaaaacagaagctgaacacgtttaccgtgcagaagtcgctcggctgttcgatagtgaactggaagccatcgaaggggctggagcgctcctgagtgcgatcactgcgccaatgtgtgtggtatctaacggcccaaataacaaaatgcagcattctatgggcaagctgaatatgttgcactacttcccggataaactgttcagcggctacgatattcagcgctggaagccagacccggcgttaatgttccatgcggcaaaagcgatgaatgtaaatgtagaaaactgcattctggttgatgacagtgttgccggtgcacaatctggtatcgacgcaggtatggaagtgttctacttctgcgccgacccgcacaataagccgatcgttcacccgaaagtcaccacctttacccatcttagccagttacctgaactgtggaaagcgcgtggttgggatattacggcataattcttcacactcccttcacttaccccgcttaaattggcgctcaaaggtaagtaaagggagtttgatatgtctgttagtcgtcgggtaatacatcacggactttattttgcagttttaggaccgttaattggtgttctgtttcttgtcctctacatattcttcgcaaaagaaccgctggttctttgggtgataatacatccaatttttctcttattgagcataactacgggagctattcctgcgttgttaaccggtgtaatggttgcctgtctgccggaaaagatcgggagtcagaaacgttatcgttgtctggctggtggcataggtggcgtcgttatcaccgagatctattgtgcagttattgtacatattaagggcatggcttccagcgagttgtttgaaaacattctttctggtgacagtctcgttgtccgcatcattcctgcattgctggcaggtgtggtgatgagcagaatcattacccgtctacccggattggatattagttgtcctgaaacagactctttaagttaagcgggatactttatctttgggctactcaaaagcagacaggatgtttctatgactcaaaatatcaggccgttaccccaattcaaatatcatcccaagccactggaaacaggcgcatttgaacaggataaaaccgtagagtgcgattgctgtgaacaacagacgagtgtttattacagcggtcccttttattgcgttgatgaagttgaacatctctgtccgtggtgtattgcggacggttctgctgctgaaaagtttgcaggtagttttcaggatgatgccagcatagaaggtgttgaatttgagtatgatgaagaggacgaatttgccggtattaagaacacatatcctgatgaaatgctgaaagagttggttgaacgcacgccaggttatcatggatggcagcaggaattctggctcgcgcattgtggcgatttctgtgtttttatcggctatgtgggctggaatgatataaaagatcgcctcgatgaatttgccaaccttgaagaagattgtgagaatttcggtattagaaattctgatctagctaaatgcctgcaaaagggtggtcattgtcagggttatctcttccgctgtctccactgcggcaagctgagactgtggggtgattttagctaattatttaaataatgagaacaggccggagcgtaattcacacatccggccttatttcttaagcttaaccgagtgctaattctgcggcagcggctttatcagcgattaccatcaggctaggatgcagctgcaacacggaagctggaacatcttcggtaaccggaccttgcagaacatttttcagtgcctgcgctttacccgcgccgctgacaattatcagcaagtttttcgccgccatgatgcttttcggccccatcgtcacgtagctgtcaggcactaagctaaagtcgccgcccaactcgccatgcgccacaatatcaaccatctctccctggatcgggaactccacggtttgctcatggaaatgggtcgtattcggcaaattgccacaaaaatgaccatctgcacctaatcccagcaccaccaaatccagtccgccttcacgcgccagtttctgatcatgctcgcggtagttatcaatagtgagcttctggatattctcttctttgatccccgcaggggtgaaaaacagattacgcagattggtaatcgttacgccttctccctctttgccgcgaaatggaatttcatcaaaattatagaaatagcagttatcgtaccagggcttacctttaaccagggtggtgaggtattcatacatgcctttgggcgtgctaccggcggtaattgccaggttaacacgacgcgtcttgctcatataaccaagcagatggtgtgccgcgacacggctcatttcctggtaatcttcggtaatgattaatttcatcttaatgccttattttatttaaataatttctgtacaaaggctgcataggctggtcgccagacatccatttcatggttcagacccggatattcctggtaatcaaagttaatttttttctgctcaagctcagttttcagcccggcgatatccttgccggttacgacatctttatcccccacaaccacagtaaaattacgtagttgctggttgatagctgccggatcgttcagtcgggccgcgacaccttcatccggtacggttgtcgtggtaacaccactgaatgtggccagccagccaaagctttccagatgattcattccggaaaccagcgcctggtacccgccttgactaagccctgccagcgcgcggccatcggcatctttacggacattaaaacgcttgctaatcagcgggataatatcgttcatcagttcgcgatctgccgctttagcattcagcggataaaagactttacgtctttcctgaggcacgaaatcttcgggaataatgcccttcgcatcggtttctgtatccgggatcaccaccagcatcggtttaattttcccttcagcaagcaggttatccatgatttgcgggatacgcccctgatcgatagcggaacgtccggtatcaccaaagccgtgatagaaatagagcactggcaaaggctcgcccatgccggtgtatcctggcggggtccagacatacatctgacgttcagattgcaatgcgttggagtggtaagttatggcgatcaaatcaccatgcgcaacagaacgcgtatccagataactgcctggcaccagaatcatactggagttaacctggcgctgaggattagtcattgcggtgcctgtatcaatgctgcgtacaccatcaacattgaaaaaatactcgtacaggttgcctttcaggataggtgtgcgccagctccagactcctgcttcgtctttggtcatcgggtgaatattgtccggaaccggaacacccaccactacagagacattttttgccccaggggcaaagtagcgaaaggtcacgctgttatcggcattgacctgagtcacatactgtttcaccgggatagtgggtgccgggctggctggcatatccgctgctatggcccactgagcagaaataccgctggcaatagccagcgttaaagcagcaatttttatattcatcgtaatattcctttcattaagttccattaccaccagatttcagcctgggcaccgacagcaaactggtcgtctttattgtcttcaaaggtgaagccatccagttcgttttccagggctttgatatacgtggcgtagaaacgaatttccggacggctggtcaacatactggtattgactttaaaggtatggaagagcgtggttttataaccagactcattaaatttattactattcgcatctttgttttgctgggtgaaatagcccagttcaacacctgtctggttatattggtcccaaatataggccgggcgaacaaccgcacgaatagattcgaaatcagagtgggcgcctgtttcgtagctatatatatcgttaccgaaggagtaaacaatcgcgttagctacaatgaaatgatcgccaatataggcttcgccctggctagtcagacgtaccgctgttccgccggtgtgatcaccataataacgaccattaaaggtggtaaatggacttgcgccagcataacggccaaagttactggcgatagagttattcgcgaccaggaaggagaattcgttgaagccacctttatcaaatttctgcgttaaagatgtgccaaacatccaggtatctttccagtcataatacccgttattatcctgattatctttttcgcttgcgctttcgtttgccgtgacataacgaccacttaccattaaggtggctttatcccataacgggatatctttatagcgtaaatcaatggtattggtattaatctgctgtttgttttgcaggctgcgatcgtaatcatcgacatcttcgcgaaccagcgcgatatcaattttacccggaccgactttccagttttccagacctacacccgctgcggcatcagtacgctgcgttttccagtcaagcatctggatttcaattttcggcgcaccgtgtttacccacccagaaatcagcctctggcgcaaagggcaggaaacctttggtggtaacgtacatatcggagaactgcatatagttctcgccaccggcgttatcgccaaaccagccggtagagtactgctgaccaacgttaccatccatcatcacaacggcatcaacccgtttgccgttttcgttgtagacacgttgttttaactgcaaatcaaaccagccggagtattcgttaccaaagcggcccagagaaccaatcgcccaacttttaggactaccatgagaggcggtcccccaaccagaacggtaatagccgttgtaactaaagccaatttcatctttcacaaatttactgaaatctttcagagtcatggaagaataaatgctgcctgtctcactggcatttttctcttcatttttgaccagtacagcatcaggttttgcggcactactggtcgggaacggattggcggcatacccttgatcattcgtacttacgctacgattcaccgtcgctggcgtatactttttcttctcttcatctttatactttttgagttcgctttgcgtttctcttaacgccttttctaataactcaaggcgttgttccaccgttaaactttcagccaaactttgtgcagaaaaggctaacggtgccattaataagatggcagaggtaataagatttcgtctaaacataatatccctttatggtgcaaagaaagaattaacgcatcgcatccagactgttctgaatgcgacgataattaaggtgctttaatggttattttttttaaactcagcccccgcgtcttgatcacctctgcataccatccgaagcttttcttgcgtgttcttgtgaggcttccttcgccattatcatcacgatccacataaataaagccgtagcgcttagacatttgactatgagatgcactgactaaatcaattggcccccaactggtgtaccccataatatccacaccatcggcaatcgcttcatttacctgtaccaggtgatcgtttaaataggcaattcgataatcgtcctgtatgctaccatccgcttcaacgctgtcttttgcgcctaatccgttctcgacaataaataacggtttttgataacgatcccaaagcgtatttaacagaacccgtaatccaaccggatcaatttgccacccccactcactacttttcagatgcggattggggatcatattcagtatgttgccctgcgcatttttattaatgctttcgtcgtgggaaacacaaccagtcatgtaataactaaaagagatgaaatcgacggtatgttttaaatcttctgcgtcactttcagtcatctcaatggtgatattgtggtcgcggaagaaacgctgcatatagccgggatactggccacgcgcctgaacatcaccaaagaacatccagcgccggttctcttccatggcctgcaacatatcctgtggctggcaggtgagggggtaaaccagcccaccgagaagcatattgccgattttcgcttcggggagcaggctatgacaggctttaactgcccgcgcactggcaaccagttgatggtggatagcctgataaacttccgcctcgccactctcttctgccagccccacgcccgtgaatggcgcgtgtaagctcatgttgatttcattaaacgtcagccataacgccactttatgttggtagcgagtaaagaccgtgcgggcgtaatgctcgaagtgatcgatgaccgctcgattagcccaaccgccgtagtttttcaccagcccatatggcatttcgtaatgggataacgttaccagcggcttgatccccgcctgcgccatttcatcaaacagccgatcgtaaaacgctaaccccgcttcattcggttcgacttcgtcgccctgagggaaaattcgcgcccaggcaatggaaatacgcagacaggtgaagcccatctcggcaaataacgcgatatcttccgggtaacggtgataaaaatcgatggcgacatctttgatattctctttccccaggatgcgcggttccatttttcccattacgccatgaggctgtaaatcactggtgctgatccctttgccatcttcctgccaggcaccttccacctgattggcagctgttgcgccaccccaaagaaatgtttctggaaatgctttcataattaactccttttatcgttagcgaatgatggataacagcggttcacctgcgcttatctgcgccgtgccgtggggtaatacgtccgtaaaatcatcgctattactgattaataccggcgtcgtcagatcaaatccggcctcgcgaatagcagggatatcaaaagaaatcagccgatcgcctgtattgaccttgtcacccacgttgacgtgagcggaaaagaatttgccgtccagttttacggtgtcgataccgacatgaatcaggatctccacaccatcatcactctcaatgccaatggcgtgtaatgtggcgaacaagctagcaattcgacccgcaaccggagaacgcacttcaccaacgctgggcagaatggcaatacctttacccaacaggccactggcaaacgtggtatcagcgacgtgaatgagcggcacaatctctcccgtcatcggactacagataccgccctgctcaggtggtgtaataacctctggtgttttctcttgcggggcaccctgcgctggctgacgtttagcggtgatgaaatgaagcatcaccgtaccgacaaatgcgcaaccgatggcaatgacaccgccaataacgctggcccagacggtgaaatcaattcccgtactcgggatggtttgcatgaaggtgaaaatacttggcaaaccaaaggagtagactttcgtttgcgcgtagccaataatggtggccccccaaagccccactgatacaggcgataacaaaggggtacttacgcggcaggttgacgccatataccgctggttcggtgataccaaacagactcgtcaacgccgcacttcccgccaccacttttttctgcgcatcgcgttcgcagaggaagacgccgagcgccgccccgacctgcgccataatggcgggcattaacagcgggatcatggtgtcgtagcccagcacggtgaagttattgatacacagcggcaccaggccccagtgcagtccgaacatgacgaagatttgccagaagccgcccattaccgcgcccgcaaatgcaggaaccgcctgataaagccagagataaccggcggcaatcagttcgcttatccaggtacttagcggccccaccagcagaaaggtgacgggtgtgataaccatcagacatagcaatggtgtgaagaaatttttgattgcgctcggtaaccacgcattaagtcggcgttccagaatgctgcacaaccaggcagaaaaaataatgggaataacgctactgctgtaattcaacaatgtgaccggaatacccaggaaatccagccccagcgcatccgctttttgcccgttctcgaaagcagtcagaattaatggatgcactaacgctccaccaatcaccatggcagtaaatggattaccgccgaagcgtttccccgcggtgtatcccaggattatcgggaagaaccaaaacaaggcatcactggcgctgaataaaattaaataagtaccactttgttcggtcgtccactgaaaagtgagcgccagagccagcatacctttcaagatcccggttgccgccatcaaaccgatcagaggcgtaaaaataccactaataacataaacaaagcggtttagcagattacctttatcatcattttccggtgcctgttgcgctttttcgtcaaggcctgccacactgttaaccgccaggaagacatcggccacatggttacctatgaccacctgaaactggccaccgctttccaccaccataataataccgggggtctttttcagtacctctgcttgcgctttgctttcatcctttaatttaaaacgtaatcgcgttgcgcaatgcatcagactcacaatgttatctgcgcccccgactcctgcgactatttttctggctaactccgtcataacttgccctctaccgctttgcggcaaaactccaaaaaaaaacctgaaaaaaacggcctgacgtgaatcaagcaatttttttcaggttttgcccgcttagtgcggtaacaatcctttactcagtaataatatttcagtgttctttgcgcacgcgctctatatttatggctaaaaacataatctctgcgggactaattttacgttgatactgcaaaccaataaaaatggcgatccgttccgcacattgccatgcttgcgggtaattttgttttactgcttgttgtaaactttcatcactatcgttaatactagcatgttcaagaatacgccaggataaaaacttcagatgtgtaaccagtcgctgataactcaagctttcttcctggtaattaaggctgaactgaaattttattaattgcagcatttcgcgcattaactgcgtgacacctgcaacatcctccatatttccgctcatttgggcactgaccagatgcatggcaataaagcccacttcatctttcggtaactgcacgcccaaccgtttatcaataatggttaacgcttcttcccctagctggaactctttcgggtaaagccgctggatatcccacagcaacgggttgggcagcaacacgttttgctgaaagcgtttaatcgcaaactggcaatggtcagttaggctgatataaatactgtcctgtaattttcccaagcgctcctgcgctaaagagataatacgatcacaggttgccatcacctcaagaggaatatgacttaagagttcgcttaatcgcccgttcagttcatgactgctcaaggcatactctttttctattccactactgttaattctttcgccagcgcgtttttgaaagccaattccgcgccccatgacgactttttcccgctgttgatcatcaataaccaccacaacattattgttgagaattttggtgatttgcatgttcatagcaaggaccttttttataaacaaaaaaacccgacttcaccagtattctctggttatgtcaggttttgcctgcgaatgcagtaacaatccagtcatttattaatggtttttataacgaacatccaggttcggaaattaatttaattgcgtgcagagaaaatagcaatgcgctattgataaaaatatgaccatgctcgcagttattaactttgtgtaattttaggaatttataaagttatatataacaaatcccaataattaagttattgggatttgtctggtgaattatttgtcgctatctttccccgccagcagtttatccagctcatcgccaccgacgtgacggaaatcctgccccttcacgtagtagaagataaactcacaaatattctggcagcggtcgccaatacgttcgatagaacgcgcgcagaacagcgcagtaagtacgctcggaatggtacggctatcttccatcatgtaggtcatcagttgacgaacaataccttcgtattcctgatcgacttttttatcttcacgataaatacgtaccgcttcgtcaatgtccatccgcgcgaacgcgtccagcacgtcgtgcagcatctggatggtatgacggcccaggctctccagacttaccagcaacggctgatgctgctgggagaatttctccagcgcagtacggcagattttgtccgccacgtcgccaatacgctccagctcggcaatggttttactgatcaccataaccagtcgcaggtcgctcgccgtcggctgacgtttggcgataatgcgcacgcaggcttcatcgatcgccacttccatcatgttgacgttcttgtcgccttcgatgacgcgcttcgccagatcgctgtcctggttatgcatcgcggtgattgcatcagaaagctgctgctccaccatgccgcccatggtcatcacctgcgtgcggatactttccagttcggcgttgaactggccggaaatatgtttattaagattgagactgtccataacgcactcctgaatcaaccgtaacgaccggtgatgtagtcttctgtttgtttcttcgctggcttggtgaacagatcgtccgtgttgctgaactcaatcaattcgcccaggtacataaacgccgtgtggtcggaacaacgcgcagcctgctgcatgttgtgggtgacgatcaccacggtgtaatcctgcttcagttcggtgatcagctcttcaatacgcccggtagagatagggtcgagcgcgctacacggttcgtcgagcagcagcacttccgggcgaatggcgataccacgcgcaatacacagacgctgttgctgaccaccagagagagagtaaccgctctggtgcaatttatctttggtttcgttccacaatgcggctttggtcaatgcccactgcacgcgctcgtccatgtcggcacgggagagcttctcaaacagacgaacgccaaaagcgatgttgtcgtagatggacatcggaaacggcgtcggtttctggaacaccatgcccactttcgcacgcagcagtgcgatatcctgagagttggtcaggatgttgtcgccatcaagcagaatttcaccttccgcacgctgctccgggtacagttcaaacattttgttgaaggtacgcagcagcgtgcttttaccgcagccggacggcccgataaacgccgttacctggtttttagcgatatccaggttgatgtttttcagggcatggaatttgccgtagtagaagttcaaattacgaacctgaattttactcggggcagtttcaaccatactcattgcaatcttttcctcatcgtgcctgatgcacttcgctaatcaggcttaccgtaggccggatcaggcgttcacgccgcatccggcaaagtgttaaccgtgtacagagtcaaaaaggcgctcggtcggtcccctcgcccctctggggagagggttagggtgaggggaaaaccgtgtcagcaatatcaaccgtgtttattcttcgcaaaaacaacgcgcgccagaatgttcagcagcagtacgcacagggtaatgatcaataccccggcccaggccaattgctgccattccgcaaacgggctcatcgcaaacttaaagatcgtcaccggcaggttggcgatcggctgcatcatgtccgtgctccagaactggttggagagcgcggtaaacagcagcggcgcggtttcaccagcaatacgggcaatcgccagcaggataccggtcataatcccggacacgctcgctttcagcgtaatcgcagagatcatcttccacttcggtgtacccagcgcataagccgcttcacgcaggctgtacggcaccagtttcagcatgttctcggtggtgcggataacaatcggcacctgcaacaacgccagggcaatcacgcccgcccagccggagaagtgctccatctgcgccaccacaatggtgtaaacaaacagaccaaccacaatgctcggcgcagagagcagaatgtcgttaatgaagcgaatcacttctgccagccaggatttacgaccatattccgccagataaatccccgccataatgcccagcggcgtaccgaataccgtggcccacaaaattaacagcccgctacccgccagagcgttcgccagaccaccaccttccgtattgggcggcggcgtcatttcagtgaacagcgccaggctcataccgtcgataccgcgagtgatggtggacattaaaatccagatcagccagaacaggccgaaggccatcgtcgccatgctgagcgtcagcgcaatacggtttttgaggcggcgacgcgcctgcattttgcggcgagattcagccagcgccgcagtggtttgcatttcaaccatagccattagcgtgccccctcattcttagccaggcgcataatcataaacttgcttgcggcgaggacgatgaaggtaatcacaaacaggatcaggcccagttccatcagtgcggcaacgtgcagaccggattccgcttccgcaaattcgttcgccagcgcagaggtgatactgttgcccggcatatacaggctggcgctgtcgagctggtaggtgttaccgatgataaaggtcaccgccatggtttcaccgagcgcgcggcccagccccagcatgatgccgccgataacaccatttttggtgaacggaagaacgatacgccagataacttcccaggtggtgcagccaataccgtaggcgctctctttcatcatcaccggggtttgttcgaacacatcacgcattaccgccgcaatgtacggaataatcatgatggcgaggatcacgcctgccgcgaggataccgataccaaatgcggggccagagaacagcgcgccaacaatcgggatattgctcatgatattgccgaccggctcctgaaagtaaacggcgaacagcggcgcaaagataaacaggccccacatgccgtaaacgatacttggaatggctgccagcagctcaatggcgatacccagcgggcgtttcagccagccaggcgcaagctcagtcaggaacagggcgataccgaaactcaccgggacggcgatcagcagcgcgataaagctagtcaccaacgtaccgtagatcggcaccagcgccccgtagatatcgttcggtgcatcccactctttggtccataggaaagccagaccaaatttctgaatgctcggccaggaggagatgatcagagagacaataatgccacccaacatcaatagcacaatcagcgccgccagttttaccagcacgctgaaaattatgtcgccctttttacccggtgggttaaaagcaggcttggttgcagccataagttactcttcagttaaacgcgtttacaaagtcattttgtaatgccggatgcggcgtaaaacaccgtacccggcctggagttttattagtacagcggcttaccgctactgtctttaatattggtcttccacgcagcgcgaacctgttcaactacactatccggcaggctggcgtaatccaggtcgttcgcctgtttagccccggttttgtacgcccagtcgaagaatttcagcacttctgtgccttgttctggtttcttctgatctttgtggatcagaatgaacgtggtagaggtaataggccatgcatcttcgcctttctggttggtcagatcctgagcgaaggttttgctccagtctgcaccttttgctgcattagcgaagttttcttcggtcggactaaccggtttaccatcagcggagatcagtttggtgtacgccaggttgttctgcttcgcgtaagcatattcaacataaccaattgcacccggcagacgctgaacgaacgcggcgataccgtcgttacctttaccgcccagaccgatcggccattttacggtagagccagtaccaacgttgtttttccactcttcgttcactttcgccaggtagctggtgaagacgaaggaagtcccggagccatctgcgcggcgtactacagcaatgttttgactaggcagtttcagacccggattcagtttggcgatggcttcatcatcccacttcttgattttgcccaggtagatgtcgccgagggttttaccatccagcaccagttcgccagacttcagccctggaatgttaaccgccagcaccacgccgccaatcacggtcgggaactggaacagaccttcctgagccagtttttcgtcagacagcggcgcgtcagaggcaccaaaatcaacggtattagcgataatctgttttacgccaccggaagaaccgataccctggtagttaactttattaccggtttctttctggtaagtgtcagcccatttggcatacaccggcgcagggaaggttgcacctgcacctgtcaggcttgcttctgcaaacacagagaaagcactcatgcttaaggtcgcggcgacaacagttgcgacggtggtacgcataactttcataatgtctcctgggaggattcataaagcattgtttgttggctacgagaagcaaaataggacaaacaggtgacagttatatgtaaggaatatgacagttttatgacagagagataaagtcttcagtctgatttaaataagcgttgatattcagtcaattacaaacattaataacgaagagatgacagaaaaattttcattctgtgacagagaaaaagtagccgaagatgacggtttgtcacatggagttggcaggatgtttgattaaaaacataacaggaagaaaaatgccccgcttacgcagggcatccatttattactcaaccgtaacgctttttgccaggttacgcggctggtcaacgtcggtgcctttgatcagcgcgacatggtaagccagcagctgcagcggaacggtgtagaagatcggtgcaatcacctcttccacatgcggcatctcgatgatgtgcatgttatcgctacttacaaaacccgcatcctgatcggcgaagacatacaactgaccgccacgcgcgcgaacttcttcaatgttggatttcagtttttccagcaattcgttgttcggtgcaacaacaataaccggcatatcggcatcaattagcgccagcggaccgtgtttcagttcgccagcagcgtaggcttcagcgtgaatgtaagagatctctttcaacttcaatgcgccttccagcgcgattgggtactgatcgccacggcccaggaacagcgcgtgatgtttgtcagagaaatcttctgccagcgcttcaatgcgtttgtcctgagacagcatctgctcaatacggctcggcagcgcctgcagaccatgcacgatgtcatgttcaatggaggcatccagacctttcaggcgagacagcttcgccaccagcatcaacagcacagttaactgagtggtgaatgctttagtggatgccacgccgatttctgtacccgcgttggtcattagcgccagatcggattcgcgcaccagagaagaacccggaacgttacagattgccagactaccaaggtaacccagctctttgctcagacgcaggccagccagggtatccgcggtttcgccagactgactcaaggtgatcatcaggctgttacgacgcacggcagatttgcgatagcggaattcagaggcgatttcgacgtcgcacggaatacctgctaggctttcaaaccagtagcgggaaaccataccggagttataagaagtaccacaggcgaggatctgaatatgctcaaccttgctcagcagttcgtcggcgttcggtcccagctcgcttaaatcaacctgaccgtggctgatgcgtccggtaagggtgtttttgatcgcgttcggctgttcgtagatctctttctgcatgtagtgacggtaaatgcctttatcgcccgcgtcatattgcagattggattcgatatcctgacgttttacttccgcgccagttttatcgaagatgtttacgctacggcgagtgatttccgcaatatcgccctcttcaaggaagataaagcgacgggtcaccggcaacagcgccagctggtcagaagcgataaagttttcgcccatccccaggccaatcaccagcggactaccagaacgtgccgccagcagggtatccgggtgacgggagtccatgatcactgtaccgtacgcaccacgcagctgcgggatagcacgcagaacggcctcacgcagagtcccgccttgtttcagctcccagttcaccagatgggcaatcacttcggtgtcggtttcagaaacgaaggtatagccacgcgcttttagctcttcacgcagcggttcatggttttcgatgatgccgttatgcaccaccacaatgtgttcagaaacatgcggatgcgcattcacttcactaggttcaccgtgggtcgcccagcgagtgtgagcaataccagtgccgccatgcagaggatgttcttccgctgcctgtgccagcatctggactttaccgaggcgacgcaggcgggtcatatgaccttctgcatcaacaacggccagaccggcagagtcatatccgcggtattccagacgacgtaaaccttcaagaaggatttctgctacatcacgttgcgcgatcgcgccaacaattccacacatagtttttgattccgatttatatcgttgtcggtcaacctgtatgcccgttttttcgggcgccccgagccttgtagagagtggggttatttttatagttactgcttgtgggagggagattatgttatctcctcatcccatgtgaccgggttagccggccagaatcactttttctttaccggacgacgccagccttctttctgagtctgcggcacacggctgatagctaatgcattttcgccgacattacgcgtcacagttgtacccgcagcaatggtcgcgcctttgcctactgttaccggggccaccagctgagtgtcggaaccaacaaacacatcgtcgccgataatggtcttaaatttattcgcaccatcgtagttgcaggtaatggttcccgcgccgatgttaacgttatcgccaatttccgcatcgcccaggtaagtcagatgaccagctttgctgcctttacccagacgcgcttttttcatctcaacgaagttaccgacgtgagcaccttccagcaactcagcaccaggacgcaaacgggcaaacgggccaatggtacaggccgctgccagattcgcatcttccacaacggtatacggactgatttcgcaatcatcgccaatcacgctgtttttaatcacgcaaccggtgccaattttcacgcgatgaccgagagtcacgttgccctcgatgataacgttagtatcaatttcaacatcgcgcccgtgagttagcgtaccacgcagatcaaaacgcgctggatcgcgcagcataacgcctgctaacagcagtttttcagcctgttcggactgataaacacgctccagacgggagagttgcaggcggttattcacgccttctacttcgcttaaacgttgcggatgaacggcgacgatttcacgcccttcctgatacgccagcgcaataatgtcggtgatgtagtattcgccctgagcattattgttggtcagcttcgccagccagcgtttcatatctgcgccgttggcaatcagaatgccggtgttgatctcctgaatctgacgctgctcgtcggtggcatctttgtgctcaacaatgccggtaactttgccgttttcacgggtgatacgtccataaccggtcggatcatccagtttcaccgtcagcagaccaatgccaccctgcggtttagcatcacgcagacgctggagtgtttcgacagagatcagcggcacgtcgccgtagagcattaaaatgtcttcatcatcggcaaagaaaggtgcggcctgctgcattgcatgacccgtacccagctgctctgcctgaagcacccagttaaggttgtcgtctttcagcgcctgttttagcagatcgccgccgtgaccgtacaccaggtgaacgtgcgctgcgcctaattcattcgcagcatcaatgacatgctgaaccatcgctttcccggcaagggtatgcagcactttcggaagatcggaatacatgcgcgtgcctttgcctgcggcaaggatcactacgctcatagcattattcaacatacgcgtcctgactgtaatttgagaacgaatttaaaccgcttcaccttgaaaaaactacatttttttcatcgtgaaatggacagaggataaattgttcaataacggattatccccgctgacgaaagcgccattttcgaccatcgtcacgccttttgtctgcagaaaattaaggcagtaccttaatttaagcgtcaggtggatgtttttgctcttatttcgatcaatgaataaacaggaaaacaggggggttttatatcagcaggatctatgtgaacgctattcaggacgggtcacacgcgcaaaaaaaagccagcctgtttccagactggcttttgtgcttttcaagccggtgttacatcgcttttttggtcaactcgataacgcgcagctgcgcgatcgctttggccagttccgcagacgcctgagcgtaatctacgtcgccgtgagagctgctaatgtgctcttcagccttacgtttcgcttccatggctcgcgcttcgtcgagatcctggccgcgaattgcggtgtcggccagaacggtcacgttgccaggctgcacttcaagaatgccgccagacagatagataaactcttcgtgaccgtgctgtttcacgatgcgaatcataccaggcttaatggcggtgagcagcggtgcgtggccagggtagatccccagttcaccttcgctacccgttacctggattttctcgaccagaccagagaacatttgttgctctgcgctgacgacgtccaggtggtaagtcattgccatatcaccctccgattaaggcgttaaagttttttggctttttccacagcttcttcgatggaaccgaccatgtagaacgcctgctccggcaggtgatcgtattcgccttccatgatgcctttaaagccacggatggtgtctttcagggagacgtatttacccggagaaccggtgaatacttctgccacgaagaacggctgggacaggaagcgctggatcttacgagcacgcgctaccaccagtttgtcttcttcagacagttcatccatacccaggatggcgatgatgtctttcagttcctgataacgttgcaggatggactgaacgccacgcgcggtgtcgtagtgttcctgaccaaccaccagcgggtccagctgacggctggtggagtccagcgggtcaacggccgggtagatacccagagacgcgatctgacggctcagtaccacggttgcgtcaaggtgcgcaaaggtggttgccggagacgggtcagtcaagtcatccgcaggtacgtatactgcctgtacggaggtgatagaaccagttttggtggaggtgatacgttcctgcagaacgcccatctcttccgccagggtcggctgataacctaccgcactaggcatacggcccagcagtgcggatacttccgtaccggccagggtgtaacgatagatgttgtcaacgaacagcagaacgtcacgaccttcgtcacggaatttctcagccatggtcagaccggtcagagcaacgcgcagacggtttcccggcggctcgttcatctggccatacaccagggatactttgtcgataacgttggagtcggtcatttcgtggtagaagtcgttaccctcacgagtacgttcacctacgcccgcaaacacagagtaaccggagtgctcgatcgcgatgttacgaatgagctccatcatgtttacggttttacctacacccgcaccaccgaacagaccaactttaccgcccttagcgaacggacacatcaggtcgataactttgataccggtttccagcagttcctgagagttactcagctcttcgtaggaaggtgctgcgcggtgaatcgcccaacgctcttcttcaccgatctcgcctttcatgtcgaccggttcacccagtacgttcatgatacggcccagagtcgctttacctaccgggacttcaatcgggtgttcgaggtcttttacatccagaccgcgacgcagaccgtcggaggaacccattgcgatggtacgtacgataccgccgccgagctgctgctgaacttccagcaccagacgctcattaccattttgcacctcaagagcatcgtacacgcgcggtacggcatcctgagggaattcgacgtcaactacggcgccgattacctggacaatctttccagtagccatcttaaatcctctacgaaataacctgtttaaaccgcggcggccccgctgacgatctcggtgagttcctgagtaatgctggcctgacgagctttgttgtataccaactgcagctctttaatcaggctgccgccattgtcggtcgcggctttcatcgccaccatacgggcggcctgctcgctggccaggttttcaaccacgccctgataaacctgagattcgacataacgacgcagcagggtatccagcaacgccttcggatcgggttcgtacaggtaatcccaggatttatgtttcagatcatcatcatcacttgccggtaacggcagcagctggctgatggtcggaacctgagacatggtgttaataaatttgttgctgacaatgtaaagcttgtccagacggccttcgtcgtaggcctgcaacatcacttttaccggaccgatcagttcggacagggaagggttatcccccatgccggtgacctgggcaacaacattgccgcccacggagttgaagaagctcacgcctttgctgccgatcattgcgaggtcgcattgaacgcctttgtcggtccaggtcttcatttccgccagcagttttttgaacaggttaatgttcaaaccaccgcacaaaccacggtcggtgctcaccaccaggtagcccacgcgtttaacgtcgcggtcttccaggtaagggtgcttatattccagattaccgtgtgcaaggtgaccaatcactttgcgcatggtttctgcataaggacggctggccgccatgcgatcctggcttttacgcattttggaagcggcgaccatctccatcgctttagtgatcttttgcgtgttctggacgcttgcgatcttactacgtatctcttttgcgccggccatgagcttctcctcaatgccttgcggcctgccctaaggcaagccgccagacgttaccaggattgggttgctttgaaggaatcgaggatgcctttcagcttgccttcgatttcgtcgttgtagccaccggtctggttgatctcttgcatcaacggagcgtgatcacggtcgacgtaagccagcagagcggcttcgaagctgccaattttgctcagttcaacatccgccaggtaaccacgttctgctgcgaacagaaccagagactgctgcgcaacggacatcggcgcatactgtttctgtttcagcagttcggtcactttctgaccgtggtcaagctgcttacgtgttgcatcgtcaaggtcggatgcaaactgagagaacgctgccagttcacgatactgtgccagagcggtacggataccaccggacagttttttcatgatcttggtctgtgctgcaccaccaacacgggatacggaaatacccgggttaaccgcaggacgaataccggcgttgaacaggttggtttccaggaagatctgaccatcggtaatggagattacgttggtcggaacgaacgcagaaacgtcacccgcctgagtttcgataatcggcagtgcggtcagagaaccggttttccctttcacttcacctttggtgaaggcttcaacgtattcggcgttaacacgtgcagcacgctccagcagacgagagtggaggtagaaaacgtcgcccgggaatgcttcacgtcctggcggacgacggagcagcagggagatctgacggtaagcaacagcctgtttagacaggtcatcgtaaatgatcagcgcatcttcaccgcggtcacggaagtattcgcccattgcgcaaccggcatacggtgccaggtattgcagtgcagcggattcagacgcggttgctaccacaacgatggtgttagccagtgcgccgtgctcttccagtttacgtaccacgttagaaatggtggacgctttctggccgatagcgacatagatacatttgataccggaatcgcgctggttgatgatggcatcgatagccagtgcggttttacctgtctgacggtcaccgatgatcaattcacgctgaccacgaccgattgggatcatggagtcaacggctttataaccggtctgtaccggctgatctacggactgacgttcgataacgcccggagcgattgcttctacagcagagaagccgtcgtgatccagcggacctttaccgtcgattggtgcacccagagtgttaaccacacggcccagcaggccacggccaaccggaacttccaggatacggccagtacacttaactttcatgccttcggcaaggtcagcgtacggacccataacaaccgcacctacagagtcgcgctcgaggttcagtgcgatagcgtaacggttacccggcagggagatcatttcaccctgcatacaatcggccaggccgtgaatgcggataacaccgtcacttacagaaacaatagtaccttcgttgtgagcttcactcacaacattgaactgagcaatgcgctgcttgatcagttcgctgatttcggtggaattcagttgcatgctccagtccccttaagactgcaagacgtctgcaaggcgctcaagacgaccgcgtacgctgccatcaatgaccatatcacccgctcggatgataacgcctgccattacagacttatcgattttgcaattcagcttaactttgcgactcagacgtttttccatcgcagcagaaattttcgcgagctgttgttcactcagtgcggcagcggaaatgacgtctacctcagcggtagcctcactcacggcacgcaggtgaataaactgctccagaacatccgggagcgcgttaagacgaccattttcagccataacccgaatcaggttctgaccgttttcgtccagttgctcaccacaaactgcgataaagctctcggcgagcgtttctggcgcaagcgcgccagagagaagctctgccatttgttcgtttttggttacctcggcggcaaacgccagcatgtcctgccagcgttctacactttggtgttcgacggcaaagtcaaaagctgctttggcgtaggggcgagctaccgtaataaattcagacatcagcccctccctccttacagttcagcgacaagtttatccacgatgtcgctgttagcagcttcatccacggaacgttcgatgatcttctcggcgccagcaacagccaggatagcaacttgcttacgcagctcttcacgggcacgtttacgctcggcttcaatttccgcctgcgcctgggccacgattttagtacgttcctgttctgcctcagctttcgcttcgtccagaatctggctgcggcgtttgttcgcctgctcgatgattacctgggcttccgctttcgcttttttcagctggtcggtcgcgctggcctttgcaaggtcaaggtccttatgtgctcgttctgcggaagcaaggccgtcagcaatttctttttgacgtttttcgatggctgccattaatggcggccatacgtacttcatgcagaacagaacgaacaggacaaacgcgatggcctggccgaggattgttgcgttaagattcacagcacaatgcctctatttagttaacgttctgatattgctctttaaataaaagcaacgcttattacgcgacagcgaacatcacgtacagacccagacctacagcgatcatcgggatagcatccaccagacccataacgataaagaactgagtacgcagcagaggaatcagatcaggttgacgcgctgcgccttccaggaatttacccccgaggatgccgataccgatcgcagcaccgattgccgccagacccatcatcacagcggcagccatgtacagcagatccatattcaggttttccatgacagtctccagtttgtttcagttaaaacgtagtagtgttggtaaattaatgttcttcagacgccatgctcagatagacgatcgtcagaaccatgaagatgaaggcttgcagcgtaatgatcaggatgtggaaaatggcccacggcacattcaggatccactgactccaccacggcaacagaccagcaatcagaatgaaaatcagctcaccggcatacatgttaccgaacagtcgcaaaccgagactaactggtttggacagcaggcttaccccttcaaggattaagttgacaggaatgaacgcccagtgattgaacggctgcagcgtcaactctttcgtgaagccgccgatgcctttcattttgatgctgtagaacagaatcaggataaatacgcccagtgccatagacagcgttacgttcacgtccgcagacggaaccacacgcagtgcaggcagacccagtacatgttcagcaatgtacggcagcaggtcgataggcagtaaatccatcaggttcatcaggaatacccagacgaagatcgtcagggccagcggagcaatcagcttgcttttgccatggtacatgtctttcacgctaccattaacaaagccgatcaccagctcaatcgcggtctgaaacttacctggcacaccgctggtcgcctttttggctacgctacggaataaaaccaggaacaacagacccagcaccacgctgaagaacatggagtcaatattgattgtccagaaggtggctggggggttttgtggatccaccaggctgaatgtacgcaggtccagctgaaggttattcaggtggtgtcctatgtaatcctgcggcgtcatattttcactagccatgatgccttttaccctttgttgttaattacagccggtgccagtatctgaaccaccagcaccaaaacccacgtaacgatcagcggcaagaataccgcctttaaaaccgccaacgccaccaccagtaacaccaacatcgccagaactttgaaagcttcgccaaatgcgaatgtccaggccacccggcctttcgctggtgtatgcgcctggtgacgccaggcaaatatcataaacaaaacgttaggcagaaagactgccaggcccccgcttattgcagagacgccccagaaggggtctttgaggctgaacagcaatccacttgctatcaccaccagtaactgaacgagcagaagcttccgagcaacgtttcgactcacgaggctcacagacatcacgtttttcactcctgctcccttcgaggtatgccgcgtgtcgtataaaactttctttaaggcttagagtcaagcatcaaaaagcggtcaaattatacggtgcgcccccgtgatttcaaacaataagtagccaaaaggtgaataaatgtttaaatatttttccagtgcatacaattgcgacttttctgctaaccctgttcgatcatgaaaaactgtaaataacgcgtaaacactggtgataaagcgtgcttcagatcacatattgcgcatgttcgcgcacagcatatttatttacttggcaaatgatgcctttgcaagtttatgatatttcagtctaaaaacagatactgttttaataaatgacatttacacaacaaaaaccacccattgacatttttaataatgttttaacagccaatgatggttcttagcgccgatttttagcagactgatattttcactaatgacttattttctgcttaccaaaaaaagccacgttatcttgttgatgcaaaagagtgaacgtggcgttaaatgtaaccagttatatcagtagaaaacctggttgttgttaacagtctaaccggtcaattttttatgatttttttgataaaaattaaattttatttgctttaatcaccaccagatgacgttcgccatccagggctggaacctgaagtttaaccacactttcgacctgatattcttcgggcaacaaagcgatttcatcttccggcatttgccctttcagcgcgtagaaacggccttgctcaccaggaagatggtggcaccagctcaccatatcgttcagagaggcaaaagcgcggctaattacgccatcaaatggcggctcactaggaaactcttctaccctgctctgtactggttcaatattctccagtttaagctcatgttgcacctgacgaaggaaacgcacgcgtttaccaaggctatccaacagagtgaaatgggcttcaggacgcacgatagagagtggaatgcctggcagtcctggtccggtgccgacatcgataaaccgttcaccttgcagatacggtgccaccacaatgctatcgagaatatggcgtaccagcatctcattaggatcgcggacgctagtcaggttgtacgctttgttccatttatgcagcatattcacgtaggcaataagctggtttttctggtgatcggtaaggctaatacctgcgtctttcagcagtaaggagagtttgttgagcacggtgattacctgttcttgatgcgttgcctggtaagcgggtgcttaccaggcatttttaatgcgttatgcgctacgacgcagcataccctgttttttcagccacaccagcagaatggagatggccgcaggcgtgacgccagaaatacggctagcttggccgatagaggctggtttgtgatcgttaagtttggcgatcacttcgttagaaagaccggatacctggcggtaatccagtgtcgcgggtagcagggtgttctcgttacgcagctgcttttcgatctcatcttgctggcgcgcgatataaccttcgtatttaacctgaatctcaacctgttccgccgcctgttcgtctgtcaacgcaggggcaaacggcgtcagcgtggttaatttttcataagtcatttccggacgacgcagcagatcttcaccactggcttcacgggaaagcggcgcagtcaggtgagcattcacttcggctgcagcttccgcgctcggggttacccaggtgcttttcagacgctgacgctcacgctcgatattctcaagtttctcgttaaagcgcgcccaacgttcgtcatccaccaggcccagttcacgaccgatttcagtcaaacgcagatccgcattatcttcgcgtagcatcagacgatattctgcgcggctagtaaacatacgatacggttctttggttcctaaagtgcacaggtcatcaactagtacgccgagatacgcctgagaacgtgccggagcccaaccttctttgtcagcagacagacgggcagcgttaagaccggccagcaaaccttgcgcagcggcttcttcgtaaccggtagtgccgttaatctgaccagcaaagaacagcccctggataaacttgctctccagcgtcggtttcaggtcgcgaggatcgaagaagtcatactcaatggcataacccggacgcacgatcttcgcgttttccatcccctgcatagagcggacgatttgcatctgcacatcgaacggcaggctggtggagataccgttcggataaatttcattagaggtcagtccttccggttcaaggaagatctgatgctgatttctgtcggcgaagcgcatgactttgtcttcgatgctcgggcagtagcgtgggccgacaccttcgatcacccctgcgtacattgggctacgatcgaggttactgcggatcacatcatgggttttctcgttggtatgagtgatataacacggcacctgctggggatgctgggacgcattgcccataaagctgaataccggcattgggttatcgccatgctgttgcgccagtacgctaaagtcgatggttcgagcatcaatacgcggtggtgtcccggttttcagacgaccaacgcgcagcggcagttcacgcaaacggcgagaaagcggaatggacggcggatcaccagcacggccaccgctgtaattatccagaccgatatgaattttaccgtcgaggaacgtcccaacggtgagcacgacggctttggcacggaacttcagtcccatttgggtaacagcaccgaccacgcgatcgttttcgacaataagatcttcaaccgcctgctggaagatcatcaggttcggttggttctccagcgccgtacgtaccgcctgacggtagagcacacgatccgcctgagctcgggtagcgcgaaccgccggtcctttgcttgcgtttagtatcctaaactggatacccgcctgatcgatcgctttcgccatcagaccgccgagtgcatccacttcttttaccagatgtcccttcccaataccgccgatcgccgggttgcagctcatctgccccagagtgtcgatattgtgtgtcaaaagcagagtctgttgacccatacgcgccgcggccatcgcggcctcggtgcctgcatgacccccgccaatgatgatgacgtcaaaaggatccggataaaacatggtgattgcctcgcataacgcggtatgaaaatggattgaagcccgggccgtggattctactcaactttgtcggcttgagaaagacctgggatcctgggtattaaaaagaagatctatttatttagagatctgttctattgtgatctcttattaggatcgcactgccctgtggataacaaggatccggcttttaagatcaacaacctggaaaggatcattaactgtgaatgatcggtgatcctggaccgtataagctgggatcagaatgaggggttatacacaactcaaaaactgaacaacagttgttctttggataactaccggttgatccaagcttcctgacagagttatccacagtagatcgcacgatctgtatacttatttgagtaaattaacccagcttcccagccattcttctgccggatcttccggaatgtcgtgatcaagaatgttgatcttcagtgtttcgcctgtctgttttgcaccggaatttttgagttctgcctcgagtttatcgatagccccacaaaaggtgtcatattcacgactgccaataccgattgcgccaaagcggactgcagaaagatcgggcttctgttcctgcaatgcttcatagaaaggagaaaggttgtccggaatatctccggcaccgtgggtggagctgataaccagccagatcccactggcaggtaaatcttctaacagcggaccgtgcagcgtttcggtggtaaaacccgcctcttccagcttttcagccaggtgttctgctacatattcggcaccgccgagggtgctgccgctgataagagtgatatctgccataaaccgccacctttattaagagtggcgtattgtacgctgtgaacgcgttgggatctacctgtggaaaagtatgggattaaaaaagccgatcagggcttgatggtacgcatgatcgggttttgcaggacgatcaatgtctcggtggactgaatttcatcaattgtttggatcttgttgataagtacatgctggagagcgtcgatgctacggcacatcacttttataaagatgctgtagtggccggttgtgtaataggcttcagtgacttcatcaaggctttccagctttgccagcgcggaagggtagtctttggcgctctttaatataatgccgataaagcagcctacgtcataaccgagctgcttcgggctgacatcaatacgcgccccggtaatgatccccgcctgcttcattttctctactcgaacgtgaatcgtccccggactgacgccaaattgtttcgccagttcggcgtaagcggtgcgcgcattgcccattaatgcttccaggatgccacggtccagattgtcgatcagataattttccataggattttcttatgcggattgatgattcattctattttagccttcttttttaatgaatcaaaagtgagttaggctttttattgaatgattattgcatgtgtgtcggtttttgttgcttaatcataagcaacaggacgcaggagtataaaaaatgaaaaccgcttacattgccaaacaacgtcaaattagcttcgtgaaatctcacttttctcgtcaactggaagaacgtctggggctgatcgaagtccaggcgccgattcttagccgtgtgggggatggcacgcaggataacttgagcggctgtgaaaaagcggtgcaggtaaaagtgaaagctctgcctgatgcccagttcgaagtggttcatagtctggcgaagtggaaacgtcagaccttagggcaacacgacttcagcgcgggcgaagggctgtacacgcacatgaaagcccttcgccccgatgaagaccgtctttctccgttgcacagcgtctatgttgaccagtgggactgggaacgcgtaatgggcgacggtgagcgtcaattcagcactctgaaaagcacggtagaggcgatctgggcgggaattaaagcaaccgaagctgcggttagcgaagagtttggcctggcaccgttcctgccggatcagatccacttcgtacacagccaggagttactgtctcgttatccggatcttgatgccaaagggcgtgagcgggcgatagcgaaagatcttggcgcggtattccttgtcgggattggcggcaagctgagcgatggtcatcgccacgacgtgcgcgcaccggattatgatgactggagcaccccgagtgagctgggccatgcgggtctgaacggcgatattctggtgtggaacccggtactggaagatgcgtttgagctttcctccatggggatccgtgtagatgccgacacgctgaagcatcaactggcgctgaccggtgacgaagatcgcctggagctggagtggcatcaggcgctgctgcgcggtgaaatgccgcagaccatcggcggcggtatcggccagtctcgtttgactatgctgctgctgcaactgccgcatatcggccaggttcagtgtggagtatggccagctgctgttcgcgagagcgtcccttctctgctgtaataatttatcgccgccagcgtctgagcaggcggcttcgcatcccggtatcaaagcgccagatatgatcgaaaatgcgcatgatgccgggtttgccgtgtgcgctcatcgccacggcatgaaagcgatgctgatgtacccgctgcagctctttcactttactcgtcacgtcgtcaggcaaccgctgagcgataaaatcagaaatcaccaccgcatcggcatcaaaccattccctgctttgcaagcgttccataatggcgcgaaaacaactggcaagatcggtgccgccacgaaactgctggcttaaaaaacggattgcttgttcgatgccttgtgggccactaagctcataacggacgatctcggtggaaaatagcataatatagcagcgccggttttctgcgagagcaatgcgcatcaaggccaggcagaacgctttcgcacactgttcattaaagccgcccatactgccggaagtatccacacagacaataaacggcccgcgcggctgttcatcgtaatctttatgtaccaccggacgttcgatcactttttcacgccagctctcaccgtgcaggcgataggtgagcaactgtttttccaccagccgacggtaaaactcatactccagttccgttatccctagtgtcgccagttctggcggcaggagacgtaaaatatcatcgctttgttgcagaccatcaacctgctcaggaaccgtcgccggttcgcgcaccatggtgcggaaggtttccatctgcgcatcgttgcgcggtatacttttggcttcccgagaacgccccagctgctctgccaggcgtttcagttccggctgttcgttaagaaattcaccgtatttcacaatcaactgatagtcgccacgtttaagctgaccggcgctcatatcccacagacgaccagctgcagtattgttatctgcgagaatcggttcaagttgtccgctcagcgtcatgcgttcctgaacttcactcaacagttgttcgcgttcttcttctaatagctgttgatttaacgtcgttgcttgcacgatcagacttaaacgccaacgctggagaaaaagcgtgtgtaacgcactagtgatcgtgctgttagcatcaaccaactgtcgggcttgttctgcccatggagaattcagacgatgcagtaagtccaggatctgtggtagctgcacaataaactgtggcgtggagaggagctggctttgctgatagcacatcacctcttcggtgagttccggcgggactcgggcatctttcagccgactgcgcagcgcttcacgccagcggggaacatcatcagtgattgccgccttcaggcgtgggaatttttcaaagaagaccgccagctgcggactggccagcagtgcgatgatcatctcttcgatcaatccctcttcgctgacggccagcatcacattaagcgtatccagcgttagcattgttgtgcctggcgaatctgtgcaccgacatcctgtaggctggcttcaatgcgacctaaccagtcgccagggataaacagacatttttgctgttcgctgaataaagcgtgttgcttgcgccagtcgctttcaagctcttccagttgttgttttatttcaccaggcagaccttcagcgctactaccgggaagtgccagcgtactgccttgtaaacttacatcgcgaacgacaagatgttgggcgctatcaacttccagattcagtttctgggcaaagccgataccgttcagtttaccgcgaatttcaccacctttgctcagccactgttccagcgcgctacgctcaaaggagatatgaaccacttccatatcatgcagttttaacggtttttgcagcagtagagtcagagtggaagcagtaacgttaacaggaagttgatactgctgacgacggctgaaaatgccgcccagacgaattaccgttaaggctgttttatcgctttgttgctgctggagttgcaggtgacgttgcacaatcgcgccaaggcgagtcaacatcccttgctgttgccaggcgtgaccggtcatcaatacatcaatttgttgttgtatcaaattcaggctttgcgcgtcataccacaggcaatctttcagcaaaatgagatctaccggggcaacagcactgcgaccgctaaaaaaggcgctggcctgcaataatcggatcgcttttttccagcgacgatcgctgacataaggcgcatccggtaatttatccagttgctggcgcagcataaaaatcagctcaaatacatgatcgggcagcgtaatttcaccaatctctttctgccagcgttcatattcttcatctgtgacctgcaaggcatcaggaaccggattgtcgttttcatcctgttgactggtcagcatggagcggaaattcgctttatcctgcactttatctaaccacagacgaatcagcatgcggtcatataacgcttccagactgctgtctgcttccggcagctcgttggaggccgccaccagcagacgcatcgggattttttctacgtgtgcaccgttgcggaactggcgctcgttaatggcggtgagcaaggtattaagaattgccgggcccgctttccagatctcatccagaaagacaatttctgcttccggcaggtaaccgctggttaaacgttcatagcgcccttcatcttttagcgcctgaatagaaaggggaccaaaaacttcttccggcgtggagaagcgggtcatcagatattcaaacgcgcgggcattctgaaaggcgaattttaagcgccgggcgatcaaacttttggcaatacctggcgggccaaggaggaacacactttcaccacttaatgccgctaataaacacaagcggatggcgtggctacgttcataaagccccttttccaagctactgctcaggcgggaaattctttccgctaataaatgagggtgagccataatgaagtggcgtcctttcgtcaaaagttctgcgtaaattgcgagtatagacgtttcttgctggtggctaaaatagtctcaaagggggggtatttttctttgagccaggttaatgtggccgcatttaggagtacgattttgccgttaatcgtgcatactgtgcgcttttttgtgggccaagggactaagcacacatttcatatttcaacgaaagactagtctatgagcactgataataagcaaagtttgcccgcgattaccctcgcggcgattggagttgtctacggcgatattggtaccagcccgttatatacacttcgtgaatgtttgtccggccagtttggttttggcgttgaacgcgatgccgtgtttggctttttaagcctgatcttctggctgctaatctttgtggtttccattaaatatctcaccttcgtgatgcgggcagataacgccggtgagggggggatcctgacgttgatgagccttgccgggcgtaatacgagcgcgcgaaccacaagtatgctggtgattatggggctaatcggcggcagctttttctatggtgaagtcgtcataacacccgctattagcgtgatgagtgccattgaaggtctggaaatcgtcgccccgcagctggatacctggatagttcccctcagtattatcgttctcactttattatttatgattcaaaaacatggcacggctatggtcggtaagctgtttgcgccgatcatgctgacctggtttttgattctggcaggactggggttacgtagcattattgctaacccggaagtgctgcatgcgctgaatccaatgtgggcggtgcatttcttccttgaatacaaaacggtttcttttattgcattaggggcagtggtgttgagcattacgggggtcgaggcgctgtatgctgatatggggcactttggtaagttccctattcgcctggcgtggttcaccgtcgtattaccttccttgacccttaattacttcggtcagggagcgctgttgttaaagaacccggaagcgattaagaacccgttcttcctgttggcaccggactgggcgctgatcccgctgctgatcatcgccgcactggcgacggtaattgccagccaggcggttatctctggcgtcttcagtttgacgcgtcaggcggtacgtctgggatatttgagcccgatgcgcattattcacacctccgaaatggagagtgggcaaatctatattccgtttgtgaactggatgctctatgtcgcggtcgtgattgtgattgtcagctttgagcactccagcaacctggcggcggcgtacgggattgcggtgaccggaaccatggtgctgacgtctattctcagcactaccgtggcacgtcagaactggcactggaataagtattttgttgcgctgatcctgattgctttcctttgtgtcgatattccattgttcaccgctaacctcgataaactgctctccggcggctggttgccattgagcctcggtactgtgatgtttatcgtgatgaccacctggaagagcgagcgtttccgcttgctgcggcggatgcatgaacatggtaactctctggaagcgatgattgctagcctggagaaaagtccgcctgttcgcgtgcccgggaccgcggtgtatatgagccgtgcaatcaacgtcattccctttgcgctgatgcataaccttaaacataacaaggtattgcatgagcgggtgattctgttaactctgcgcaccgaagacgctccatatgtccataacgtccgtcgggtacagattgaacaactgagccccactttctggcgcgtggtggcaagttatggttggcgagaaacgccaaacgtagaagaagttttccaccgctgcggtctggaaggattaagttgccggatgatggaaacctccttctttatgagccatgagagcttgatcctcggcaaacgcccgtggtatttgcgtctgcgcggcaagctgtacttgctgctgcaacgtaatgcgctgcgtgcaccagatcaatttgaaatcccgccaaacagggttatcgaactgggtactcaggtcgaaatctaacgccagacgcctcctttcttcataagggggcgtttttgttttcatggttaatcaccatgtaaaacgtttcgaggttgatcacatttccgtaacgtcacgatggttttcccaactcagtcaggattaaactgtgggtcagcgaaacgtttcgctgatggagaaaaaaatgaaaaaaggcaccgttcttaattctgatattagtagcgtgatctcccgtctgggacataccgatacgctggtggtgtgtgatgctggtttacccatccccaaaagtacaacgcgtatcgatatggcattaacccagggtgtaccttcttttatgcaggtgctgggcgtcgtcacaaatgaaatgcaggtcgaggcggccattatcgcggaagagatcaaacaccataatccgcaactccacgaaacgttgctcactcaccttgagcagctgcaaaaacaccagggaaataccattgaaattcgttacaccacgcatgaacaattcaaacaacaaaccgcagaaagtcaggcggtaattcgcagcggagaatgttctccgtatgcgaatatcattctctgtgctggcgtgacgttctgaggccgtcatggaagcattacttcagcttaaaggcatcgataaagccttcccgggcgtaaaagccctcagcggcgcagcgttaaatgtctatccgggccgcgtgatggcgctggtgggcgaaaacggcgcgggtaaatccaccatgatgaaagtgcttactggcatctatactcgcgatgccggtacgcttttatggctggggaaagaaacgacatttaccgggccaaaatcttcccaggaagccgggattgggattatccatcaggaactgaacctgatcccgcagttgaccattgccgaaaacattttcctcggtcgtgagtttgttaatcgctttggcaaaattgactggaaaaccatgtatgccgaagcggataaattgctggctaaacttaacctgcgctttaaaagcgacaagctggtgggcgatctttccatcggtgaccagcaaatggttgaaatcgccaaagtgctgagctttgagagcaaagtcatcattatggatgaaccgaccgatgcgctgaccgataccgaaaccgaatccctgttccgcgtcatccgcgagctgaaaagccaaggccgcggtattgtctatatctcccaccgcatgaaagaaatcttcgagatttgcgatgacgttaccgtttttcgtgatgggcaatttattgctgagcgcgaagtggcaagtctgaccgaagatagcctgattgagatgatggtgggtcgcaagctggaagatcaatatccgcacctggacaaagcgccgggagatatccgcctgaaagtcgataatctctgcggacctggcgttaacgatgtctcttttactttacgcaaaggcgaaattcttggcgtctctggtttgatgggcgcaggtcgtaccgaactgatgaaagtgctctacggcgcactaccgcgcaccagcggttacgtcaccctggatgggcatgaagtcgttacccgtagtccgcaggatggcctggcaaacggcattgtgtatatctccgaagaccgtaaacgtgacggtttagtgttgggcatgagtgtaaaagagaacatgagcctgacagcgctgcgctacttcagccgcgctggcggcagtttgaagcatgccgatgaacagcaggctgtgagtgatttcattcgtctgtttaatgtgaaaactccgagcatggaacaggcaattggtctgctttccggtggcaatcagcaaaaagtggcgattgcccgcggtctgatgacacgccccaaagtgttgatccttgatgaacctacccgtggcgtagatgtcggcgcgaaaaaagagatctatcaactgattaaccagttcaaagccgatggcttgagcatcattctggtgagtagcgagatgccagaagtattaggcatgagcgatcgcatcatcgtcatgcatgaagggcatctcagcggggaatttactcgtgagcaggccacccaggaagtgttaatggctgccgctgtgggcaagcttaatcgcgtgaatcaggagtaaaaaaatgacaacccagactgtctctggtcgccgttatttcacgaaagcgtggctgatggagcagaaaagccttatcgctctgctggtgctgatcgcgattgtcagcacgttaagcccgaactttttcaccatcaataacttattcaatattctccagcaaaccagtgtgaacgccattatggcggtcgggatgacgctggtgatcctgacgagcggcatcgacttaagcgtaggttctctgttggcgctgaccggcgcagttgctgcatctatcgtcggcattgaagtcaatgcgctggtggctgtcgctgctgctctcgcgttaggtgccgcaattggtgcggtaaccggggtgattgtagcgaaaggtcgcgtccaggcgtttatcgctacgctggttatgatgcttttactgcgcggcgtgaccatggtttataccaacggtagcccagtgaataccggctttactgagaacgccgatctgtttggctggtttggtattggtcgtccgctgggcgtaccgacgccagtctggatcatggggattgtcttcctcgcggcctggtacatgctgcatcacacgcgtctggggcgttacatctacgcgctgggcggcaacgaagcggcaacgcgtctttctggtatcaacgtcaataaaatcaaaatcatcgtctattctctttgtggtctgctggcaagcctggccgggatcattgaagtggcgcgtctctcctccgcacaacccacggcggggactggctatgagctggatgctattgctgcggtggttctgggcggtacgagtctggcgggcggaaaaggtcgcattgttgggacgttgatcggcgcattaattcttggcttccttaataatggattgaatttgttaggtgtttcctcctattaccagatgatcgtcaaagcggtggtgattttgctggcggtgctggtagacaacaaaaagcagtaataacgactacaggacatcttgaatatgaacatgaaaaaactggctaccctggtttccgctgttgcgctaagcgccaccgtcagtgcgaatgcgatggcaaaagacaccatcgcgctggtggtctccacgcttaacaacccgttctttgtaagcctgaaagatggcgcgcagaaagaggcggataaacttggctataacctggtggtgctggactcccagaacaacccggcgaaagagctggcgaacgtgcaggacttaaccgttcgcggcacaaaaattctgctgattaacccgaccgactccgacgcagtgggtaatgctgtgaagatggctaaccaggcgaacatcccggttatcactcttgaccgccaggcaacgaaaggtgaagtggtgagccacattgcttctgataacgtactgggcggcaaaatcgctggtgattacatcgcgaagaaagcgggtgaaggtgccaaagttatcgagctgcaaggcattgctggtacatccgcagcccgtgaacgtggcgaaggcttccagcaggccgttgctgctcacaagtttaatgttcttgccagccagccagcagattttgatcgcattaaaggtttgaacgtaatgcagaacctgttgaccgctcatccggatgttcaggctgtattcgcgcagaatgatgaaatggcgctgggcgcgctgcgcgcactgcaaactgccggtaaaagcgatgtgatggtcgtcggatttgacggtacaccggatggcgaaaaagcggtgaatgatggcaaactagcagcgactatcgctcagctacccgatcagattggcgcgaaaggcgtcgaaaccgcagataaagtgctgaaaggcgagaaagttcaggctaagtatccggttgatctgaaactggttgttaagcagtaattttaatcaggttgtatgacctgatggtgacataaatacgtcatcgacagatgaacgtgtaatataaagaaaagcagggcacgcgccaccctaacacggtggcgcattttatggacatcccgaatatgcaaaacgcaggcagcctcgttgttcttggcagcattaatgctgaccacattcttaatcttcaatcttttcctactccaggcgaaaccgtaaccggtaaccactatcaggttgcatttggcggcaaaggcgcgaatcaggctgtggctgctgggcgtagcggtgcgaatatcgcgtttattgcctgtacgggtgatgacagcattggtgagagcgttcgccagcagctcgccactgataacattgatattactccggtcagcgtgatcaaaggcgaaagtacaggtgtggcgctgatttttgttaatggcgaaggtgagaatgtcatcggtattcatgccggcgctaatgctgccctttccccggcgctggtggaagcgcaacgtgagcgtattgccaacgcgagtgcattattaatgcagctggaaagtccactcgaaagtgtgatggcagcggcgaaaatcgcccatcaaaataagactatcgttgcgcttaacccggctccggctcgcgaacttcctgacgaactgctggcgctggtggacattattacgccaaacgaaacggaagcagaaaagctcaccggtattcgtgttgaaaatgatgaagatgcagcgaaggcggcgcaggtactgcatgaaaaaggtatccgtactgtactgattactttaggaagtcgtggtgtatgggctagcgtgaatggtgaaggtcagcgcgttcctggattccgggtgcaggctgtcgataccattgctgccggagatacctttaacggtgcgttaatcacggcattgctggaagaaaaaccattgccagaggcgattcgttttgcccatgctgccgctgcgattgccgtaacacgtaaaggcgcacaaccttccgtaccgtggcgtgaagagatcgacgcatttttagacaggcagaggtgacgcttggctacaatgaaagatgttgcccgcctggcgggcgtttctaccagtacagtttctcacgttatcaataaagatcgcttcgtcagtgaagcgattaccgccaaagttgaagcggcgattaaagaactcaattacgcgccaagtgctctggcgcgtagcctcaaactcaatcaaacacataccattggcatgttgatcactgccagtaccaatcctttctatagtgaactggtgcgtggcgttgaacgcagctgcttcgaacgcggttatagtctcgtcctttgcaataccgaaggcgatgaacagcggatgaatcgcaatctggaaacgctgatgcaaaaacgcgttgatggcttgctgttactgtgcaccgaaacgcatcaacctagccgtgaaatcatgcaacgttatccgacagtgcctactgtgatgatggactgggctccgttcgatggcgacagcgatcttattcaggataacagcttgctgggcggagacttagcaacgcaatatctgatcgataaaggtcatacccgtatcgcctgtattaccggcccgctggataaaactccggcgcgcctgcggttggaaggttatcgggcggcgatgaaacgtgcgggtctcaacattcctgatggctatgaagtcactggtgattttgaatttaacggcgggtttgacgctatgcgccaactgctaagtcatccgctgcgtcctcaggccgtctttaccggaaatgacgctatggctgttggcgtttaccaggcgttatatcaggcagagttacaggttccgcaggatatcgcggtgattggctatgacgatatcgaactggcaagctttatgacgccaccattaaccactatccaccaaccgaaagatgaactgggggagctggcgattgatgtactcatccatcggataacccagccgacccttcagcaacaacgattacaacttactccgattctgatggaacgcggtagcgcttaattactcgctttcacttggaacgcggttcggcttagatttacgctgtcttttgatcaaattattaccatcggttgttttcagaagcatgaacattgctgcactagcaacagtaataatgcccattgtgataaacgtatagtggaattgttcgacagtcgttgtgccttccattccttcataaacgcgaaggacggccgcacttacagcaacgcctaaactaatgctcagttgctgcgtgaccgccagaacactgttaccgctgctggcattgtcatcggtcagatcggcaagtgtgatggtattcatcgcggtaaactgcgtgctcatagccatccctaatataaacaacggcaagatcagcatccatatagccattgctggactttgcaaagagaactgagcgatcattagcccaataatcaccgtgatccccactaacgtatggcgatagcccagacgacgtaagacttgggtaaccatgctttttgcaataatggaacctaacgctgtcggtgccatcatacagccagcaataaacgcctgataaccaaatcctacctgtaacatcaatggcataaggaacggtacacagccggtccccagacgggttgcaatattgcctacgataccgatgctgaaagtgcgggttttaaataaatctaaactaattaatgggtttggcgtgcgtcgtgcatggagaatatagagaagcagtaacccgatgctggtgacaattaccgtcaaggcaatccagctggcgacaatcttttccccgaatagctctattccgctactgaagagaacaaggctgaggccaaacagcaaaaagccagtgatatcgaatctgcgtcgtgcggtggtgaaattgggcatatgtttgcgcgcgtaaagaaggcccgcaatacctatggggatattgattaaaaatatccagtgccaggttgcccaggtgaccagcacgccgccaagaacggggcctaaaattggccccaccagacccggcatggcgacaaaattcaatactggaagaagttcattacgaggataagcgcgcagtaaggccagccgagcaacaggcatcatcattgcgccgcctatcccctgaataacccggaagacaaccagctgtggtaggctattagaaagtgcgcaggccagagaacccaatgtgaacagactcacggcaagggtaaaaatgcgacgcgtaccgaagcgatcggctagccatccgcttaccggaataagcatcgccaccgtcagcgtataactgatgatggcactttgcatcgcgagaggagaacgattaaggctatgagcgattgcgggtaaggcggtattaagaatagtggcatcaagtgcctgcatgaagaaggccatcgccgcgatccacggcaaacccgccatactgcgcttctttttatcgctcattcaatgtcctgttatcgggttatcacttatcaggactgcgtagcagcgcctgacaagctttaaatgccgcgtcgccatcgctttggataatcgcatcgacaatcgcctgatgcagatccagctttatcactgtgtcgctggtaatactcgtgaagtaagtgtgataaacgctatggaataggctggcgaaactggtcaaaaacggattggcgctcatttcatagatatgctcatgccaggccatatcgacttcgatccagcgttcacggcgaaagttctcttttaatgccgccatttcggccattaacgtattgagatgcgctttctgttccgcggtgccaaccgttgctgccagtaggcaggcttgcggctccagacagatacgcataaccagaaagtgatcgatgacctgatgaaagttctcttctgtcatccaccaggtaagcaattcctgatcaagaaaattccagttgctttgtggcatgacccgagtaccaattcgcggtcgcggtaaaaccatcccttttgccgttaacgttttgaccgcttcgcgtaccgctgtacgactcactccaaattgctcgcccagctcaatctcaccgggcaaaatggtgccgggttcatattcaccttttaagatccgttgcgccagcttctcagccagaacatagctaaggtttttctgtgcagctaactgttgtgcgcttaaaggcattacttatcttcctttttctttttattcctccttagtatgccaccaggaagtgtgattacggttgcaaaaacggcaaattgcttgttttatggcacattaacggggcttttgctgaaaaaatgcgcggtcagaaaattattttaaatttcctcttgtcaggccggaataactccctataatgcgccaccactgacacggaacaacggcaaacacgccgccgggtcagcggggttctcctgagaactccggcagagaaagcaaaaataaatgcttgactctgtagcgggaaggcgtattatgcacaccccgcgccgctgagaaaaagcgaagcggcactgctctttaacaatttatcagacaatctgtgtgggcactcgaagatacggattcttaacgtcgcaagacgaaaaatgaataccaagtctcaagagtgaacacgtaattcattacgaagtttaattctttgagcgtcaaacttttaaattgaagagtttgatcatggctcagattgaacgctggcggcaggcctaacacatgcaagtcgaacggtaacaggaagaagcttgcttctttgctgacgagtggcggacgggtgagtaatgtctgggaaactgcctgatggagggggataactactggaaacggtagctaataccgcataacgtcgcaagaccaaagagggggaccttcgggcctcttgccatcggatgtgcccagatgggattagctagtaggtggggtaacggctcacctaggcgacgatccctagctggtctgagaggatgaccagccacactggaactgagacacggtccagactcctacgggaggcagcagtggggaatattgcacaatgggcgcaagcctgatgcagccatgccgcgtgtatgaagaaggccttcgggttgtaaagtactttcagcggggaggaagggagtaaagttaatacctttgctcattgacgttacccgcagaagaagcaccggctaactccgtgccagcagccgcggtaatacggagggtgcaagcgttaatcggaattactgggcgtaaagcgcacgcaggcggtttgttaagtcagatgtgaaatccccgggctcaacctgggaactgcatctgatactggcaagcttgagtctcgtagaggggggtagaattccaggtgtagcggtgaaatgcgtagagatctggaggaataccggtggcgaaggcggccccctggacgaagactgacgctcaggtgcgaaagcgtggggagcaaacaggattagataccctggtagtccacgccgtaaacgatgtcgacttggaggttgtgcccttgaggcgtggcttccggagctaacgcgttaagtcgaccgcctggggagtacggccgcaaggttaaaactcaaatgaattgacgggggcccgcacaagcggtggagcatgtggtttaattcgatgcaacgcgaagaaccttacctggtcttgacatccacggaagttttcagagatgagaatgtgccttcgggaaccgtgagacaggtgctgcatggctgtcgtcagctcgtgttgtgaaatgttgggttaagtcccgcaacgagcgcaacccttatcctttgttgccagcggtccggccgggaactcaaaggagactgccagtgataaactggaggaaggtggggatgacgtcaagtcatcatggcccttacgaccagggctacacacgtgctacaatggcgcatacaaagagaagcgacctcgcgagagcaagcggacctcataaagtgcgtcgtagtccggattggagtctgcaactcgactccatgaagtcggaatcgctagtaatcgtggatcagaatgccacggtgaatacgttcccgggccttgtacacaccgcccgtcacaccatgggagtgggttgcaaaagaagtaggtagcttaaccttcgggagggcgcttaccactttgtgattcatgactggggtgaagtcgtaacaaggtaaccgtaggggaacctgcggttggatcacctccttaccttaaagaagcgtactttgtagtgctcacacagattgtctgatagaaagtgaaaagcaaggcgtttacgcgttgggagtgaggctgaagagaataaggccgttcgctttctattaatgaaagctcaccctacacgaaaatatcacgcaacgcgtgataagcaattttcgtgtccccttcgtctagaggcccaggacaccgccctttcacggcggtaacaggggttcgaatcccctaggggacgccacttgctggtttgtgagtgaaagtcgccgaccttaatatctcaaaactcatcttcgggtgatgtttgagatatttgctctttaaaaatctggatcaagctgaaaattgaaacactgaacaacgaaagttgttcgtgagtctctcaaattttcgcaacacgatgatgaatcgaaagaaacatcttcgggttgtgaggttaagcgactaagcgtacacggtggatgccctggcagtcagaggcgatgaaggacgtgctaatctgcgataagcgtcggtaaggtgatatgaaccgttataaccggcgatttccgaatggggaaacccagtgtgtttcgacacactatcattaactgaatccataggttaatgaggcgaaccgggggaactgaaacatctaagtaccccgaggaaaagaaatcaaccgagattcccccagtagcggcgagcgaacggggagcagcccagagcctgaatcagtatgtgtgttagtggaagcgtctggaaaggcgcgcgatacagggtgacagccccgtacacaaaaatgcacatattgtgagctcgatgagtagggcgggacacgtggtatcctgtctgaatatggggggaccatcctccaaggctaaatactcctgactgaccgatagtgaaccagtaccgtgagggaaaggcgaaaagaaccccggcgaggggagtgaaaaagaacctgaaaccgtgtacgtacaagcagtgggagcacgcttaggcgtgtgactgcgtaccttttgtataatgggtcagcgacttatattctgtagcaaggttaaccgaataggggagccgaagggaaaccgagtcttaactgggcgttaagttgcagggtatagacccgaaacccggtgatctagccatgggcaggttgaaggttgggtaacactaactggaggaccgaaccgactaatgttgaaaaattagcggatgacttgtggctgggggtgaaaggccaatcaaaccgggagatagctggttctccccgaaagctatttaggtagcgcctcgtgaattcatctccgggggtagagcactgtttcggcaagggggtcatcccgacttaccaacccgatgcaaactgcgaataccggagaatgttatcacgggagacacacggcgggtgctaacgtccgtcgtgaagagggaaacaacccagaccgccagctaaggtcccaaagtcatggttaagtgggaaacgatgtgggaaggcccagacagccaggatgttggcttagaagcagccatcatttaaagaaagcgtaatagctcactggtcgagtcggcctgcgcggaagatgtaacggggctaaaccatgcaccgaagctgcggcagcgacgcttatgcgttgttgggtaggggagcgttctgtaagcctgcgaaggtgtgctgtgaggcatgctggaggtatcagaagtgcgaatgctgacataagtaacgataaagcgggtgaaaagcccgctcgccggaagaccaagggttcctgtccaacgttaatcggggcagggtgagtcgacccctaaggcgaggccgaaaggcgtagtcgatgggaaacaggttaatattcctgtacttggtgttactgcgaaggggggacggagaaggctatgttggccgggcgacggttgtcccggtttaagcgtgtaggctggttttccaggcaaatccggaaaatcaaggctgaggcgtgatgacgaggcactacggtgctgaagcaacaaatgccctgcttccaggaaaagcctctaagcatcaggtaacatcaaatcgtaccccaaaccgacacaggtggtcaggtagagaataccaaggcgcttgagagaactcgggtgaaggaactaggcaaaatggtgccgtaacttcgggagaaggcacgctgatatgtaggtgaagcgacttgctcgtggagctgaaatcagtcgaagataccagctggctgcaactgtttattaaaaacacagcactgtgcaaacacgaaagtggacgtatacggtgtgacgcctgcccggtgccggaaggttaattgatggggtcagcgcaagcgaagctcttgatcgaagccccggtaaacggcggccgtaactataacggtcctaaggtagcgaaattccttgtcgggtaagttccgacctgcacgaatggcgtaatgatggccaggctgtctccacccgagactcagtgaaattgaactcgctgtgaagatgcagtgtacccgcggcaagacggaaagaccccgtgaacctttactatagcttgacactgaacattgagccttgatgtgtaggataggtgggaggctttgaagtgtggacgccagtctgcatggagccgaccttgaaataccaccctttaatgtttgatgttctaacgtggacccgtgatccgggttgcggacagtgtctggtgggtagtttgactggggcggtctcctcctaaagagtaacggaggagcacgaaggttggctaatcctggtcggacatcaggaggttagtgcaatggcataagccagcttgactgcgagcgtgacggcgcgagcaggtgcgaaagcaggtcatagtgatccggtggttctgaatggaagggccatcgctcaacggataaaaggtactccggggataacaggctgataccgcccaagagttcatatcgacggcggtgtttggcacctcgatgtcggctcatcacatcctggagctgaagtaggtcccaagggtatggctgttcgccatttaaagtggtacgcgagctgggtttagaacgtcgtgagacagttcggtccctatctgccgtgggcgctggagaactgaggggggctgctcctagtacgagaggaccggagtggacgcatcactggtgttcgggttgtcatgccaatggcactgcccggtagctaaatgcggaagagataagtgctgaaagcatctaagcacgaaacttgccccgagatgagttctccctgactccttgagagtcctgaaggaacgttgaagacgacgacgttgataggccgggtgtgtaagcgcagcgatgcgttgagctaaccggtactaatgaaccgtgaggcttaaccttacaacgccgaagctgttttggcggatgagagaagattttcagcctgatacagattaaatcagaacgcagaagcggtctgataaaacagaatttgcctggcggccgtagcgcggtggtcccacctgaccccatgccgaactcagaagtgaaacgccgtagcgccgatggtagtgtggggtctccccatgcgagagtagggaactgccaggcatcaaattaagcagtaagccggtcataaaaccggtggttgtaaaagaattcggtggagcggtagttcagtcggttagaatacctgcctgtcacgcagggggtcgcgggttcgagtcccgtccgttccgccaccctaattaggggcgtagttcaattggtagagcaccggtctccaaaaccgggtgttgggagttcgagtctctccgcccctgccagaaatcatccttagcgaaagctaaggattttttttatctgaaataaccctctccgaagtaaatccttctaccggcatccttgccagccattcatattaatacacttcatccagcacgttaattttcaaaagatcgcgaatcaacgcatttttatcgctattttgcagccatatggcataaagcggccgactaagtgttgtgctatcgacaacggtatgcaggccgccttttttacgcgcccagctgacgggtagccaggtgcaaccattaagcatcgcaatctgttgctgtgccagttcagcagaactggttgtcagaatgggcacttcgtcagcaccgatcaaacctgcctcatgctgttgaaaatctggcccccactcaagtcgcagataattaagatctccctttagtttactaggggcactggtataaagcgctaaagtgaaatatcccagcaactgactactaaattcgtccattttgggcgcttcagtggtaataagaagatcaagctggcgttcatgcagctgttttaccagagactgccgttgggcaattcgcgcttcgaactgtaagcctgtatgggcatcctgattttgatacaagcgtcccagccactgattaagcatacattcccacaagctggcgctggcaccgatagaaaactcgttatgtcgactggtatgcgccacctccttacgggcggcctgccaggtgctcatgagcgtttctgcataaggcagtagtttttcaccggcagcggttaaacggatattgtttctgtggcgggtgaaaaggttcacacccagttgattttccagttgtctgattcgaaagctcactgcactctgggtcagatagaggctttcagccgctcgaccaaagtgacgcgttcggctaacttccaggaaagtttttaacaattccgtatccacagtgctctccgcaaaattatttgtcgttatgatttaaatgttttgttttacactctgtcaagcgtaactaatactccgcgccataactagctcggtcaaagaattaggagcgtgcaggatggcggaaagctttacgacgactaatcgatatttcgacaataaacattatccacgtggattctctcgtcatggtgatttcaccatcaaagaggcacaactgcttgagcgtcatggttatgccttcaatgagttggatcttggcaaacgcgagccggttaccgaggaagagaaactcttcgtagcagtatgccgtggcgaacgtgagccagtgacagaagcagaacgcgtgtggtccaagtatatgacgcgtattaagcgtccaaaacgttttcacaccctttccggcggtaaaccgcaggttgaaggtgctgaagactacaccgattctgacgattaataaaaagggcgaaatgccctttttttatgtcagtagtttctgcagatggatgagcaaacggtcaatcgctcgatagctaactgcctcctgcaaatgctgacgtgtgataatgtcagactgatcaatatcagcaatggttcgtgcaactttcaataaccgctgccaggcacgaatgcttaaccccagatggatcagtgttccttccaaccacatcgcatcttcgctctcaagtttgcagaattggcgtatttccggactatccagccaggcattcagtttattctgccgcttaaattggcgctctctggcggccattacgcgttgtttaacggtggcgctgctttctcccggcactaccgttttactcaaaatgccggggggtggtaatgggatctccagactgagatcgaagcggtcgagaaagggcccgctgagccggttgagataacgtaatgtctgttctggcgtgcagcggttatggtttccctgataatgtccggtagggctgggattcatcgccgcaacaagctggaaacgggctggataggttatttttgctcgtgtgcgactaagatggatctgcccggattcaatcggctctcgcaaggcatccagtgtacgccgttcaaattcaggtagctcatcaagaaaaagcacgccgttatgcgccaggctaatttcaccgggccctggaattgcgccaccgcctaccatcgcagttaagcttgcactgtgatgaggactgcggaacgggcgctgccgccattgtttttgtacactttcagcatttaccagacttaatatcgcagcactctccagtgcctcttcattgcttaaatctggcaacaggccattaatacggctggcgagcattgttttacctgttcccggcggcccaatcagtaaaaggttgtgcccgccagcagcggtaatttccagtcctcgctttccttgttcctgaccgataacatcactgagatcatgttgtagcgcccgggatactgcatcagttggtttcgggcgttcgagagcgtgcttaccttccagaaacgcacagacagcttgcagatgatcggctatcaggcatccttcaccgttaattagccccacttcatcttcgttatctttcgcgacgataatttttctgccgctcttaatagcttcagttgcactggagattgcgccgggaacgccacgcagagcgcctgtaagcgccagttctccgactaattcatattcatctaacttattggctgtaagctgttcactggccgccagcaacgcaatggcgataggtaaatcatatcgtcccccttcttttggcagatcagctggagccaggttgatggtgatttttttcgccggatattcatatccgctattgataatggcgctgcgcacgcgatcgcgagcttcttttaccgttgtttctggtaagcccaccatcgttaagccgggtagacctttactgatatgtacctcaacagtgatcgggggcgcatttactcccagggctgcgcgggtatgaacaatactcagactcataagccctccttgagtcaccattatgtgcataagatatcgctgctgtagcccgctaattcgtgaattttagtggctgattcctgtttatttgtgcaagtgaagttgagttgttctggcggtggaatgatgctcgcaaaaatgcagcggacaaaggatgaactacgaggaagggaacaacattcatactgaaattgaatttttttcactcactattttatttttaaaaaacaacaatttatattgaaattattaaacgcatcataaaaatcggccaaaaaatatcttgtactatttacaaaacctatggtaactctttaggcattccttcgaacaagatgcaagaaaagacaaaatgacagcccttctacgagtgattagcctggtcgtgattagcgtggtggtgattattatcccaccgtgcggggctgcacttggacgaggaaaggcttaaagatcaagccttaacgaactaagacccccgcaccgaaaggtccgggggttttttttgaccttaaaaacataaccgaggagcagacaatgaataacagcacaaaattctgtttctcaagattcaggacggggaactaactatgaatggcgcacagtgggtggtacatgcgttgcgggcacagggtgtgaacaccgttttcggttatccgggtggcgcaattatgccggtttacgatgcattgtatgacggcggcgtggagcacttgctatgccgacatgagcagggtgcggcaatggcggctatcggttatgctcgtgctaccggcaaaactggcgtatgtatcgccacgtctggtccgggcgcaaccaacctgataaccgggcttgcggacgcactgttagattccatccctgttgttgccatcaccggtcaagtgtccgcaccgtttatcggcactgacgcatttcaggaagtggatgtcctgggattgtcgttagcctgtaccaagcacagctttctggtgcagtcgctggaagagttgccgcgcatcatggctgaagcattcgacgttgcctgctcaggtcgtcctggtccggttctggtcgatatcccaaaagatatccagttagccagcggtgacctggaaccgtggttcaccaccgttgaaaacgaagtgactttcccacatgccgaagttgagcaagcgcgccagatgctggcaaaagcgcaaaaaccgatgctgtacgttggcggtggcgtgggtatggcgcaggcagttccggctttgcgtgaatttctcgctgccacaaaaatgcctgccacctgtacgctgaaagggctgggcgcagtagaagcagattatccgtactatctgggcatgctggggatgcacggcaccaaagcggcaaacttcgcggtgcaggagtgtgacctgctgatcgccgtgggcgcacgttttgatgaccgggtgaccggcaaactgaacaccttcgcgccacacgccagtgttatccatatggatatcgacccggcagaaatgaacaagctgcgtcaggcacatgtggcattacaaggtgatttaaatgctctgttaccagcattacagcagccgttaaatcaatgactggcagcaacactgcgcgcagctgcgtgatgaacattcctggcgttacgaccatcccggtgacgctatctacgcgccgttgttgttaaaacaactgtcggatcgtaaacctgcggattgcgtcgtgaccacagatgtggggcagcaccagatgtgggctgcgcagcacatcgcccacactcgcccggaaaatttcatcacctccagcggtttaggtaccatgggttttggtttaccggcggcggttggcgcacaagtcgcgcgaccgaacgataccgttgtctgtatctccggtgacggctctttcatgatgaatgtgcaagagctgggcaccgtaaaacgcaagcagttaccgttgaaaatcgtcttactcgataaccaacggttagggatggttcgacaatggcagcaactgttttttcaggaacgatacagcgaaaccacccttactgataaccccgatttcctcatgttagccagcgccttcggcatccatggccaacacatcacccggaaagaccaggttgaagcggcactcgacaccatgctgaacagtgatgggccatacctgcttcatgtctcaatcgacgaacttgagaacgtctggccgctggtgccgcctggcgccagtaattcagaaatgttggagaaattatcatgatgcaacatcaggtcaatgtaagcgctcgcttcaatccagaaaccttagaacgtgttttacgcgtggtgcgtcatcgtggtttccacgtctgcagtatgaatatggccgccgccagcgatgcacaaaatataaatatcgaattgaccgttgccagcccacggagcgtcgacttactgtttagtcagttaaataaactggtggacgtcgcacacgttgccatctgccagagcacaaccacaagtcaacaaatccgcgcctgagcgcaaaaggaatataaaaatgaccacgaagaaagctgattacatttggttcaatggggagatggttcgctgggaagacgcgaaggtgcatgtgatgagccacgcgctgcactatggcactagcgtttttgaaggcatccgttgctacgacagccacaaaggaccggttgtattccgccatcgtgagcatatgcagcgtctgcatgactccgccaaaatctatcgcttcccggttagccagagcattgatgagctgatggaagcttgtcgtgacgtgatccgcaaaaacaatctcaccagcgcctatatccgtccgctgatcttcgtcggtgatgttggcatgggagtaaacccgccagcgggatacagtaccgacgtgattatcgctgctttcccgtggggagcgtatctgggcgcagaagcgctggagcaggggatcgatgcgatggtttcctcctggaaccgcgcagcaccaaacaccatcccgacggcggcaaaagccggtggtaactacctctcttccctgctggtgggtagcgaagcgcgccgccacggttatcaggaaggtatcgcgctggatgtgaacggttatatctctgaaggcgcaggcgaaaacctgtttgaagtgaaagatggtgtgctgttcaccccaccgttcacctcctccgcgctgccgggtattacccgtgatgccatcatcaaactggcgaaagagctgggaattgaagtacgtgagcaggtgctgagccgcgaatccctgtacctggcggatgaagtgtttatgtccggtacggcggcagaaatcacgccagtgcgcagcgtagacggtattcaggttggcgaaggccgttgtggcccggttaccaaacgcattcagcaagccttcttcggcctcttcactggcgaaaccgaagataaatggggctggttagatcaagttaatcaataaatacaaaaaatgggacggcacgcaccgtcccatttacgagacagacactgggagtaaataaagtatgcctaagtaccgttccgccaccaccactcatggtcgtaatatggcgggtgctcgtgcgctgtggcgcgccaccggaatgaccgacgccgatttcggtaagccgattatcgcggttgtgaacagcttcacccaatttgtaccgggtcacgtccatctgcgcgatctcggtaaactggtcgccgaacaaattgaagcggctggcggcgttgccaaagagttcaacaccattgcggtggatgatgggattgccatgggccacggggggatgctttatagtctgccatctcgcgaactgatcgctgattccgttgagtatatggtcaacgcccactgcgccgacgccatggtctgcatctctaactgcgacaaaatcaccccggggatgctgatggcttccctgcgcctgaatattccggtgatctttgtttccggcggcccgatggaggccgggaaaaccaaactttccgatcagatcatcaagctcgatctggttgatgcgatgatccagggcgcagacccgaaagtatctgactcccagagcgatcaggttgaacgttccgcgtgtccgacctgcggttcctgctccgggatgtttaccgctaacagtatgaactgcctgaccgaagcgctgggcctgagccagccgggcaacggcagcctgctggcaacccacgccgaccgtaagcagctgttccttaatgctggtaaacgcattgttgaattgaccaaacgttattacgagcaaaacgacgaaagtgcactgccgcgtaatatcgccagtaaggcggcgtttgaaaacgccatgacgctggatatcgcgatgggtggaagcactaacaccgtacttcacctgctggcggcggcgcaggaagcggaaatcgacttcaccatgagtgatatcgataagctttcccgcaaggttccacagctgtgtaaagttgcgccgagcacccagaaataccatatggaagatgttcaccgtgctggtggtgttatcggtattctcggcgaactggatcgcgcggggttactgaaccgtgatgtgaaaaacgtacttggcctgacgttgccgcaaacgctggaacaatacgacgttatgctgacccaggatgacgcggtaaaaaatatgttccgcgcaggtcctgcaggcattcgtaccacacaggcattcagccaagattgccgttgggatacgctggacgacgatcgcgccaatggctgtatccgcagcctggaacacgcctacagcaaagacggcggcctggcggtgctctacggtaactttgcggaaaacggctgcatcgtgaaaacggcaggcgtcgatgacagcatcctcaaattcaccggcccggcgaaagtgtacgaaagccaggacgatgcggtagaagcgattctcggcggtaaagttgtcgccggagatgtggtagtaattcgctatgaaggcccgaaaggcggtccggggatgcaggaaatgctctacccaaccagcttcctgaaaagtatgggtctcggcaaagcctgtgcgctgatcaccgacggtcgtttctctggtggcacctctggtctttccatcggccacgtcagtccggaagcggcaagcggcggcagcattggcctgattgaagatggtgacctgatcgctatcgacatcccgaaccgtggcattcagttacaggtaagcgatgccgaactggcggcgcgtcgtgaagcgcaggacgctcgaggtgacaaagcctggacgccgaaaaatcgtgaacgtcaggtctcctttgccctgcgtgcttatgccagcctggcaaccagcgccgacaaaggcgcggtgcgcgataaaagcaaactggggggttaataatggctgacagccaacccctgtccggtgctccggaaggtgccgaatatttaagagcagtgctgcgcgcgccggtttacgaggcggcgcaggttacgccgctacaaaaaatggaaaaactgagcagccgtcttgataacgtcattctggtgaagcgcgaagatcgccagccagtgcacagctttaagctgcgcggcgcatacgccatgatggcgggcctgacggaagaacagaaagcgcacggcgtgatcactgcttctgcgggtaaccacgcgcagggcgtcgcgttttcttctgcgcggttaggcgtgaaggccctgatcgttatgccaaccgccaccgccgacatcaaagtcgacgcggtgcgcggcttcggcggcgaagtgctgctccacggcgcgaactttgatgaagcgaaagccaaagcgatcgaactgagtcagcagcaggggttcacctgggtgccgccgttcgaccatccgatggtgattgccgggcaaggcacgctggcgctggaactgctccagcaggacgcccatctcgaccgcgtatttgtgccagtcggcggcggcggtctggctgctggcgtggcggtgctgatcaaacaactgatgccgcaaatcaaagtgatcgccgtagaagcggaagactccgcctgcctgaaagcagcgctggatgcgggtcatccggttgatctgccgcgcgtagggctatttgctgaaggcgtagcggtaaaacgcatcggtgacgaaaccttccgtttatgccaggagtatctcgacgacatcatcaccgtcgatagcgatgcgatctgtgcggcgatgaaggatttattcgaagatgtgcgcgcggtggcggaaccctctggcgcgctggcgctggcgggaatgaaaaaatatatcgccctgcacaacattcgcggcgaacggctggcgcatattctttccggtgccaacgtgaacttccacggcctgcgctacgtcagtgaacgctgcgaactgggcgaacagcgtgaagcgttgttggcggtgaccattccggaagaaaaaggcagcttcctcaaattctgccaactgcttggcgggcgtagcgtcaccgagttcaactaccgttttgccgatgccaaaaacgcctgcatctttgtcggtgtgcgcctgagccgcggcctcgaagagcgcaaagaaattttgcagatgctcaacgacggcggctacagcgtggttgatctctccgacgacgaaatggcgaagctacacgtgcgctatatggtcggcggacgtccaagccatccgttgcaggaacgcctctacagcttcgaattcccggaaagtccgggcgcgctgctgcgcttcctcaacacgctgggtacgtactggaacatttctttgttccactatcgcagccatggcaccgactacgggcgcgtactggcggcgttcgaacttggcgaccatgaaccggatttcgaaacccggctgaatgagctgggctacgattgccacgacgaaaccaataacccggcgttcaggttctttttggcgggttaaggaaaaatgcctgatagcgcttcgcttatcaggcctacccgcgcgacaacgtcatttgtggttcggcaaaatcttccagaatgcctcaattagcggctcatgtagccgctttttctgcgcacacacgcccagctcaaacggcgttttctcatcgctgcgctctaaaatcatcacgcggttacgcaccggttcggggctgttttccagcaccacttccggcaacaatgccacgccacagccgagtgccaccatgcttaccatcgcttcatgcccgccaaccgtggcgtaaatcatcgggttactgattttattgcgtcgaaaccacagttcaatgcggcggcgtaccggcccctgatcggccataataaacggcaccgtactccagtccggcttctctacgctcacctgattacgcaccgggcagggcagcgcgggggcaatcagcactactgccagattctccagcatgctaaacgccactgcgccgggcaaggtttccggtttacccgcaatcgccagatccgcttcaccagtgaccaccttttccatcgcatctgccgcatcaccagtagtaagtttaatctccacgctcgggtgttccgcgcggaagcgatccagaatcggcggcagatggctgtaggcagcggtcacgctgcagaagatatgtaattcgccagagaggctcggcccttgctgatcgatggtgtggcgcaactgctgatactgcaacagcgtttgctgggcgaaaacgcgcagctcttcgcccgcttcagtcagcgtcaccgtgcggttatcgcgcacaaacagcggctgaccgagatcttcttccaggcgctgaatctgccgactgagcgtggatgggctaacgtgcatcgcccgcgcgctgcggccaaaatggcggctttccgccagatgcaggaaggttttcagatcgcgtaaatccacagggacagccctcgatgttgacgttgcaaaaattgcaatgtgacgttgtgaatatatcaatttccgcaataaatttcctgtcatatagtgaattcaatctcgcaaacgcgaaccgaacaataagaagcacaacatcacgaggaatcaccatggctaactacttcaatacactgaatctgcgccagcagctggcacagctgggcaaatgtcgctttatgggccgcgatgaattcgccgatggcgcgagctaccttcagggtaaaaaagtagtcatcgtcggctgtggcgcacagggtctgaaccagggcctgaacatgcgtgattctggtctcgatatctcctacgctctgcgtaaagaagcgattgccgagaagcgcgcgtcctggcgtaaagcgaccgaaaatggttttaaagtgggtacttacgaagaactgatcccacaggcggatctggtgattaacctgacgccggacaagcagcactctgatgtagtgcgcaccgtacagccactgatgaaagacggcgcggcgctgggctacagccacggtttcaacatcgtcgaagtgggcgagcagatccgtaaagatatcaccgtagtgatggttgcgccgaaatgcccaggcaccgaagtgcgtgaagagtacaaacgtgggttcggcgtaccgacgctgattgccgttcacccggaaaacgatccgaaaggcgaaggcatggcgattgccaaagcctgggcggctgcaaccggtggtcaccgtgcgggtgtgctggaaagctccttcgttgcggaagtgaaatctgacctgatgggcgagcaaaccatcctgtgcggtatgttgcaggctggctctctgctgtgcttcgacaagctggtggaagaaggtaccgatccagcatacgcagaaaaactgattcagttcggttgggaaaccatcaccgaagcactgaaacagggcggcatcaccctgatgatggaccgtctctctaacccggcgaaactgcgtgcttatgcgctttctgaacagctgaaagagatcatggcacccctgttccagaaacatatggacgacatcatctccggcgaattctcttccggtatgatggcggactgggccaacgatgataagaaactgctgacctggcgtgaagagaccggcaaaaccgcgtttgaaaccgcgccgcagtatgaaggcaaaatcggcgagcaggagtacttcgataaaggcgtactgatgattgcgatggtgaaagcgggcgttgaactggcgttcgaaaccatggtcgattccggcatcattgaagagtctgcatattatgaaagtctgcacgagctgccgctgattgccaacaccatcgcccgtaagcgtctgtacgaaatgaacgtggttatctctgataccgctgagtacggtaactatctgttctcttacgcttgtgtgccgttgctgaaaccgtttatggcagagctgcaaccgggcgacctgggtaaagctattccggaaggcgcggtagataacgggcaactgcgtgatgtgaacgaagcgattcgcagccatgcgattgagcaggtaggtaagaaactgcgcggctatatgacagatatgaaacgtattgctgttgcgggttaagtgcgcgctgatgccctcaccccgaccctctcccacagggagagggagaaaacactcaaggccttctcctggagaaggccttgctattagttgcggtacagcaccttaatgatgtgatatccgaactgggtgtgcagcgggccggtcggctccagtaccggacaagagaaaaccactttatcgaacgccggaaccatctgaccctggcggaattcacctaaatcaccgccgcgtttgccacttgggcaaatggagtgtttcttcgccagcttgccgaaatcggccccgttcttaatctgctcgagaagatccagagccagtttctcttcttttacaaggatatgcagtgctgctgctgtttttgccatgatcgtgccttgagtgaataattgtcaggcggcgattttagcatgatccgcagatgctaacgtaattgtcagtcagggagtggctggtacatatatggcaaaagcccggaaaatccgggcttcgcaggtccctcaaggggagaaaacttagggcctctatgggctacaaagtcattatcggggatggttattttattgtcaatttatgaggcttatggcattgatactcttgatgaccgccctctgtatgtctgcaaccaactcatgtggcaaacattgattaagataccctctgtaagtccttgctctgtttaatctgtttcgactgacttgttgtaccaggtcggctttggcccaacgaatctgctgatcaaagaattgcaggtcattgataacattactggctatttcaacatgcattccacgttttaacttgtctggtcggctgtggttgataatggaacgacgatgcatgcgttgccattaatttttccgttgagcacgacaactaacctgttttttatcatttcaggaggaatgcggccatcgtaatacgtcgtgctgaacggtccattttggctaacaggatagttaccaaagttgcattccagtatttcaccaaccttagggctgaaattaatcgccacgagtaaacctctccttagtaaactctgaaaaagtaataacacaacgttacgacccgatattttctaagtctaatggattcacgatgaactccgatttcggtcttctctctctgatttaaacatccgcagccaaccggttagcggcttacacgcggtcacattcaaatgcgattctgctacaatcctccccccgttcgaagattgagcaatacacctatgcgtctaaaccccggccaacaacaagctgtcgaattcgttaccggcccctgcctggtgctggcgggcgcgggttccggtaaaactcgtgttatcaccaataaaatcgcccatctgatccgcggttgcggttatcaggcgcggcacattgcggcggtgacctttactaataaagcagcgcgcgagatgaaagagcgtgtagggcagacgctggggcgcaaagaggcgcgtgggctgatgatctccactttccatacgttggggctggatatcatcaaacgcgagtatgcggcgcttgggatgaaagcgaacttcagcttgtttgacgataccgatcagcttgctttgcttaaagagttgaccgaggggctgattgaagatgacaaagttctcctgcaacaactgattagcaccatctctaactggaagaatgatctcaaaacaccgtcccaggcggcagcaagtgcgattggcgagcgggaccgtatttttgcccattgttatgggctgtatgatgcacacctgaaagcctgtaacgttctcgacttcgatgatctgattttattgccgacgttgctgctgcaacgcaatgaagaagtccgcaagcgctggcagaacaaaattcgctatctgctggtggatgagtatcaggacaccaacaccagccagtatgagctggtgaaactgctggtgggcagccgcgcgcgctttaccgtggtgggtgacgatgaccagagcatctactcctggcgcggtgcacgtccgcaaaacctggtgctgctgagtcaggattttccggcgctgaaggtgattaagcttgagcagaactatcgctcttccgggcgtattctgaaagcggcgaacatcctgatcgccaataacccgcacgtctttgaaaagcgtctgttctccgaactgggttatggcgcggagctaaaagtattaagcgcgaataacgaagaacatgaggctgagcgcgttactggcgagctgatcgcccatcacttcgtcaataaaacgcagtacaaagattacgccattctttatcgcggtaaccatcagagccgggtgtttgaaaaattcctgatgcaaaaccgcatcccgtacaaaatatctggtggtacgagctttttctctcgtcctgaaatcaaggacttgctggcttatctgcgcgtgctgactaacccggacgatgacagcgcatttctgcgtatcgttaacacgccgaagcgagagattggcccggctacgctgaaaaagctgggtgagtgggcgatgacgcgcaataaaagcatgtttaccgccagctttgatatgggcctgagtcagacgcttagcggacgtggttatgaagcattgacccgcttcactcactggttggcagaaatccagcgtctggcggagcgggagccgattgccgcggtgcgtgatctgatccatggcatggattatgaatcctggctgtacgaaacaagccccagcccgaaagccgccgaaatgcgcatgaagaacgtcaaccaactgtttagctggatgacggagatgctggaaggcagtgaactggatgagccgatgacgctcacccaggtggtgacgcgctttactttgcgcgacatgatggagcgtggtgagagtgaagaagagctggatcaggtgcaactgatgactctccacgcgagcaaagggctggagtttccttatgtctacatggtcggtatggaagaagggtttttgccgcaccagagcagcatcgatgaagataatatcgatgaggagcggcggctggcctatgtcggcattacccgcgcccagaaggaattgacctttacgctgtgtaaagaacgccgtcagtacggcgaactggtgcgcccggagccgagccgctttttgctggagctgccgcaggatgatctgatttgggaacaggagcgcaaagtggtcagcgccgaagaacggatgcagaaagggcaaagccatctggcgaatctgaaagcgatgatggcggcaaaacgagggaaataatcaaggccggaaaagatgcgtcagcatcgcatccggcacttactcattaatgcacttccagcggccagtggacatagctctgccactggctttcctgagcaataatctctttacccagcggatgttgggttagccaaccttgcggaagcgtcaaggtcaacagttcatggttagcctgtaatgtcatctctggcacgagatcgtcacggcgacggctggcaaaaatgatggccaggcgtagtaaacggcagagttgttctgcgacgcgcggcggtacggcattttgctgatgcaggctactgagatcgaccggattagtctggttgagcagtagcgtcgccagcaattttttctgtgcgggggtaaaaccgggaagatccagattacgcaccagataagcagcgtgttgcggcgcttgtttgaagtcaacgctcaggccgatttcatgaagctgacaggcgctgatgagcaaatcgcggcttattgcttcaagatgccattcgttttccacctgatcgaagaagttagccgcaactttggctacgcgctgtgcctgatcaatatcgatcataaagcggcgttgaatattacgcagcgtacggctgcgaatatcctgctcgacggccagatgcaacatgccgtagaccaggccttcacgcagcgcaccgcccgccagggtcatacactgaatattcagttcggtaaaaatggcgatcaggatcgccagaccactcgggaacactaacgcacgttccagcgtcagcccgtcaatctccagttcctccagccgaccgcaatgaatggctcgctgtttcaattgctgcaacttttccagggtaatgcgttcatccatcccctgtgccatcatgatttcctgtaacgcctgcacggtgccggaagcaccaacgcacactttccagccgtgataccgtaattcatcggcaaccggacgtaacacttcgcgtgccgctttttctgcagcatcaaaattttcctgccccagattacgatcggcaaaatagcgttccagccaggtgacgcagcccatgctcaggctgaacaagctggtggtttgtgcacccgtgccggttaccagttcagtactggctccgcctatatccaccaccaggcgctgatcggcaccaccagtggtgtgagcaacgccctgataaatcagacgtgcttcctcttcaccgctgatcacctgtaccggacaaccgagaatttcctgcgctttggcaataaaatcacccgcattgacggcaaggcgtaacgtcgccgtagcgacaacgcgaatttggctgggaggaatatcttgcagacgttcagcaaacaggcgcaaacattgccaaccgcgctccattgcttcattggagagggcattttcgctattcaggccagcagccagacgcactttgcgttttattcgcgtcagcgtctggatgcttccagccacctcgcgcacaaccagcatatgaaaactattgctaccgagatcaatggctgcatacaggctgctggtggaacccatactcttcatccttcaatctgtctctgtgttggctgcattctttcacctgaatcacttactacagtaagctcatcgggattcattctcttgccatcttgatacagtttgaatgattttgagtatgacattttttatttaaccactacgacgacgattacgcggagcgccagtacgacgcggaccattgcctgtgcgcgggcgcgtgaggcgcagcggttttggcagatcggtcatcaatgcgtccggattgtatttgcttaccggaatactgtgaccaatataggtctcaatagcaggcaaattcaatgcatactcttcacacgccaggctgatagagtgaccgcttgcgcctgcgcgacctgtacgaccaatacggtgaacgtaatcttcacagtcatcgggtaaatcgtagttaaagacgtgcgtcactgccggaatatgcaaaccacgcgcggcaacgtcggtggcaaccagaatatccagatcgccacgggtaaattcatcaagaatacgcagacgttttttctgcgcgacatcgcctgtcaataaaccgacacgatgaccatctgctgccaggtggccccagatctcttcacaacggtgtttggtgttggcgaaaataatcgctctgtctggccactcttcttcgatcagcgtttgcagcaaacgcattttttcttcgttagaagggtagaaaagctcttctttaatacggtggcccgttttctgttccggttccacttcaatatattcggcattgttcatctgctcgaacgccagttcacgtacccggtagctaagcgtggcggagaacagcatgttgaggcgctggtttgcaggcggcatacggcggaacagccagcggatatctttaataaagcccagatcgtacatgcgatcggcttcgtccagtaccaccacctgaatggcaccgaggttaatgtggttctgcttggcgtagtcaattaaacgccccgtggtgccaatcagaatgtcaacgccgctttccagcactttcagctgtttgtcgtagccatcaccaccgtaagccagacccagcttcaggccagtagcttccgccagcggttctgcgtcggcatggatctgcacggcaagttcacgcgtcggtgccataattaaggcacgcggctgattcaccttgcgatcggcaatcgcaggatgagagagaagataatgaaacgtactcgtaagaaacgccatcgttttcccggtaccggtttgcgcctgcccggctacgtcacgacccgccagcgtcagcggaagggccagtgcctgaatgggcgtacagttatgaaacccttttttttcaagggcttctacaaccttcggatgcagggcgaagtcggaaaacttctgttctgttaaatgtgttttgctcatagtgtggtagaatatcagcttactattgctttacgaaagcgtatccggtgaaataaagtcaacctttagttggttaatgttacaccaacaacgaaaccaacacgccaggcttattcctgtggagttatatatgagcgataaaattattcacctgactgacgacagttttgacacggatgtactcaaagcggacggggcgatcctcgtcgatttctgggcagagtggtgcggtccgtgcaaaatgatcgccccgattctggatgaaatcgctgacgaatatcagggcaaactgaccgttgcaaaactgaacatcgatcaaaaccctggcactgcgccgaaatatggcatccgtggtatcccgactctgctgctgttcaaaaacggtgaagtggcggcaaccaaagtgggtgcactgtctaaaggtcagttgaaagagttcctcgacgctaacctggcgtaagggaatttcatgttcgggtgccccgtcgctaaaaactggacgcccggcgtgagtcatgctaacttagtgttgacttcgtattaaacataccttattaagtttgaatcttgtaatttccaacgcttcccgttttatcttaaatgcgaagtgaacagatttctggcagcagtctcaatccgtcttgtcgtttcagttctgcgtactctcctgtgaccaggcagcgaaaagacatgagtcgatgaccgtaaacaggcatggatgatcctgccataccattcacaacattaagttcgagatttaccccaagtttaagaactcacaccactatgaatcttaccgaattaaagaatacgccggtttctgagctgatcactctcggcgaaaatatggggctggaaaacctggctcgtatgcgtaagcaggacattatttttgccatcctgaagcagcacgcaaagagtggcgaagatatctttggtgatggcgtactggagatattgcaggatggatttggtttcctccgttccgcagacagctcctacctcgccggtcctgatgacatctacgtttcccctagccaaatccgccgtttcaacctccgcactggtgataccatctctggtaagattcgcccgccgaaagaaggtgaacgctattttgcgctgctgaaagttaacgaagttaacttcgacaaacctgaaaacgcccgcaacaaaatcctctttgagaacttaaccccgctgcacgcaaactctcgtctgcgtatggaacgtggtaacggttctactgaagatttaactgctcgcgtactggatctggcaagtcctatcggtcgtggtcagcgtggtctgattgtggcaccgccgaaagccggtaaaaccatgctgctgcagaacattgctcagagcattgcttacaaccacccggattgtgtgctgatggttctgctgatcgacgaacgtccggaagaagtaaccgagatgcagcgtctggtaaaaggtgaagttgttgcttctacctttgacgaacccgcatctcgccacgttcaggttgcggaaatggtgatcgagaaggccaaacgcctggttgagcacaagaaagacgttatcattctgctcgactccatcactcgtctggcgcgcgcttacaacaccgttgttccggcgagtggtaaagtgttgaccggtggtgtggatgccaacgccctgcatcgtccgaaacgcttctttggtgcggcgcgtaacgtggaagagggcggcagcctgaccattatcgcgacggcgcttatcgataccggttctaaaatggacgaagttatctacgaagagtttaaaggtacaggcaacatggaactgcacctctctcgtaagatcgctgaaaaacgcgtcttcccggctatcgactacaaccgttctggtacccgtaaagaagagctgctcacgactcaggaagaactgcagaaaatgtggatcctgcgcaaaatcattcacccgatgggcgaaatcgatgcaatggaattcctcattaataaactggcaatgaccaagaccaatgacgatttcttcgaaatgatgaaacgcagttaaatttgtcttatgccaaaaacgccacgtgtttacgtggcgttttgcttttatatctgtaatcttaatgccgcgctggcgatgttaggaaaattcctggaatttgctggcatgttatgcaatttgcatatcaaatggttaatttttgcacaggactggtgggtttggaacggactttcccttctgaataaaggtcttcgtggttatacttctgctaataattttctctgagagcatgcattgtgaatttactgacagtgagtactgatctcatcagtatttttttattcacgacactgtttctgttttttgcccgtaaggtggcaaaaaaagtcggtttagtggataaaccaaacttccgcaaacgtcaccagggattgatacctctcgttggggggattagcgtttacgcagggatttgcttcacgttcggaattgtcgattactatattccgcatgcatctctctatctcgcttgtgccggtgtgcttgttttcattggcgcgctggatgaccgttttgatatcagcgtaaaaatccgtgccaccatacaggccgctgttggcattgttatgatggtgttcggcaagctttatctcagtagcctgggttatatctttggctcctgggagatggtgctcggaccgtttggttacttcctgacgctatttgccgtctgggcggccattaatgcgttcaacatggttgatggcattgatggcttgctgggcgggttgtcctgcgtcagctttgcagcaatcggtatgattttgtggttcgacgggcaaaccagcctcgcaatctggtgctttgcgatgatcgccgccatcctgccatacatcatgcttaaccttggtatcctgggtcgccgctacaaagtctttatgggtgatgcgggcagtacgctgattggttttaccgttatctggatcctgctcgaaacgacccagggcaaaacccatcccatcagcccggttaccgctttgtggataatcgccattccgctaatggatatggtggcgattatgtaccgtcgcctgcgtaaaggcatgagcccattctctcctgaccgtcagcatattcaccatttgatcatgcgtgccgggtttacttcccgtcaggcgtttgtgctgattacccttgccgcagcactgctcgcttccattggcgtgctggcagaatattctcattttgtcccggagtgggtcatgctggtgctctttttgctagcattcttcctctatggatattgcattaagcgtgcctggaaagttgctcgctttattaagcgcgtaaaacgcagactgcgtagaaatcgtggtggcagccccaatttaaccaaataaatgaggatgtgatgacacaaccaatgcctgggaaaccggccgaagacgctgaaaatgaactggatattcgtgggttgtttcgtaccttgtgggctgggaagctatggattattggcatggggctggcgtttgcgttaatcgcgctggcgtatacgttttttgctcgtcaggagtggagcagcacggcgattaccgatcgtccaacggtgaatatgctggggggatattacagccagcagcaatttttgcgtaacctggatgtccgtagtaacatggcttctgccgaccaaccaagcgtcatggacgaagcctataaagagtttgttatgcaactggccagctgggatacccgcagagagttctggctgcaaaccgactattacaaacagcggatggtgggcaacagcaaagccgatgcggcgttgctggatgaaatgattaacaacatccagtttatccccggagactttacccgcgcggtcaatgacagcgtgaagcttattgccgaaaccgcgcctgacgctaataacctgttacgtcagtatgttgcttttgccagccagcgtgcagccagccatctgaatgatgagctgaaaggcgcatgggcggcgcgtaccatccagatgaaagctcaggtgaagcgtcaggaagaggtggcgaaagccatctacgaccgccggatgaacagcattgagcaggcgctgaaaattgctgagcagcataatattagccgcagtgcgacagatgtacctgccgaggaattacctgatagtgaaatgttcctgcttgggcgtccaatgcttcaggctcgactggaaaatttacaggccgtcggtccggcctttgatctcgactatgatcagaatcgggccatgttaaacaccctgaatgttggtccaaccctggatccgcgttttcagacctatcgctatttgcgtacgccggaagaaccggtaaaacgcgatagcccacgtcgtgccttcctgatgattatgtggggcattgtcggggggctgatcggggctggtgtcgcattaacccgccgttgcagcaaataacaacactgctgcggtgagcgcaaaggcgctcgccgcttattcgaagagaatcgatgtgaaagtactgactgtatttggtacgcgcccggaagccatcaagatggcgccgttggtgcatgcgttggcaaaagatcctttttttgaggctaaagtttgcgtcactgcgcagcatcgggagatgctcgatcaggtgctgaaactcttttccattgtacctgactacgatctcaacataatgcagccaggacagggcctgacagagataacctgtcggattctggaagggctaaaacctattcttgccgagttcaaaccagacgtcgtgctggttcacggcgatacgacgacgacgctggcaaccagcctggcggcgttttatcagcgtattcctgttggtcacgttgaggctggtctgcgcacgggcgatctctatagcccgtggccggaagaggctaaccgtacattgaccgggcatctggcgatgtatcacttctctccaaccgaaacttcccggcaaaacttgctgcgtgaaaacgttgcggatagccgaatcttcattaccggtaatacagtcattgatgcactgttatgggtgcgtgaccaggtgatgagcagcgacaagctgcgtagtgaactggcggcaaattacccgtttatcgaccccgataaaaagatgattctggtgaccggtcacaggcgtgagagtttcggtcgtggctttgaagaaatctgccacgcgctggcagacatcgccaccacgcaccaggacatccagattgtctatccggtgcatctcaacccgaacgtcagagaaccggtcaatcgcattctggggcatgtgaaaaatgtcattctgatcgatccccaggagtatttaccgtttgtctggctgatgaaccacgcctggctgattttgaccgacagtggcggcattcaggaagaagcgcctagcctggggaaacctgtgctggtgatgcgcgataccactgagcgtccggaagcggtgacggcgggtacggtgcgtctggtaggcacggataagcagcgaattgtcgaggaagtgacgcgtcttttaaaagacgaaaacgaatatcaagctatgagccgcgcccataacccgtatggtgatggtcaggcatgctctcgcattctggaagcgttaaaaaataatcggataagtctatgagttttgcgaccatttctgttatcggactgggttatatcgggctgccaacggcagcagcgtttgccagtcggcaaaaacaggtaattggtgtcgatatcaaccaacatgcggttgataccatcaatcgtggcgaaatccatatcgtcgaacctgatttggcgagtgtagtaaaaactgccgtagaaggcggttttttacgagcgagcacgacgccagttgaagcggatgcctggctgattgctgtacccacgccgtttaagggcgatcatgagccagatatgacctacgttgaaagcgctgctcgctccattgcgccagtgctgaaaaaaggcgcgctggtgatccttgaatccaccagcccggtggggagtaccgagaagatggcagaatggttagcagagatgcgtccggatctcactttcccgcagcaggtgggcgagcaggcggacgtcaacattgcttactgcccggaacgcgtgttaccaggacaggtaatggtcgagctgattaaaaacgatcgcgtgattggtggtatgacgccggtttgtagcgcccgcgccagcgaactgtacaaaattttcctcgaaggtgagtgtgtcgtcactaacagccggacggcggaaatgtgtaagctcaccgaaaacagcttccgcgatgtgaatatcgcttttgctaatgaattgagcctgatttgtgccgatcaggggattaacgtctgggaactgattcgcctggcgaatcgtcaccctcgcgttaatattcttcagcctggccctggcgtgggcggtcactgcattgctgttgatccgtggtttatcgtggcacagaacccccagcaggcgcggcttatccgtaccgcgcgcgaagtgaacgatcacaaaccgttctgggttatcgatcaggtgaaagcggcggtggctgattgcctggcggctaccgataaacgcgccagtgaactgaaaatcgcctgctttggtctggcgtttaaaccgaatattgatgacctgcgcgaaagcccggcgatggaaatcgctgaactgatcgcccagtggcatagcggcgaaactctggttgttgagcctaacatccaccagttgccgaaaaaactgaccgggctttgtactctggcgcagcttgacgaggcgctggcaacggcagacgtgctggtgatgctggtcgatcatagtcagttcaaagttatcaatggcgacaatgtccatcagcagtatgtcgtcgatgccaaaggagtctggcgctgatgagaaaaattctgataacaggtggtgccgggtttattggcagcgcgctggtgcgttatatcatcaacgaaacgagcgacgcggtggtagtggtcgataagctgacctacgccggaaacctgatgagcctggcaccggtcgcgcaaagcgagcgctttgcctttgagaaagttgatatctgcgatcgggcagaactggcacgcgtattcactgagcatcagccagactgtgtcatgcatctggcagccgaaagccatgttgaccgttctattgacggcccggcagcgtttattgaaaccaacattgtcgggacttatacattgcttgaagcggcgcgggcttactggaatgcgctgacggaagataaaaaaagtgcgttccgttttcatcatatctccactgacgaagtatatggtgacctgcacagcacggatgatttcttcaccgaaaccacgccgtatgcgccgagcagcccttattccgcgagtaaagccagcagcgaccatctggtgcgcgcctggctgcggacctatggtctgccgacgcttatcaccaactgcagcaataactacggcccttaccactttccggaaaaactgatcccgctgatgatcctcaacgcgctggcgggtaaaagcctgccggtatatggcaacgggcagcaaatccgtgactggctgtatgtggaagatcacgcccgcgcgctgtattgcgtggcgaccaccgggaaagtcggtgaaacctataatattggtggtcacaacgagcgtaagaatctcgatgttgtggaaaccatttgcgagctgctggaagaactggctccgaacaagccgcacggcgtggcgcactatcgtgacctgatcacctttgtcgctgaccgtccggggcatgatctgcgttatgccattgatgctagcaaaattgcccgtgaacttggctggctgccgcaggaaacctttgaaagtggaatgcgtaaaacggttcagtggtatctggctaatgaaagctggtggaagcaggtgcaggacggcagctatcagggcgagcgtttaggtctgaaaggctaattttcagcggaggcaaacatgaaaggtattatcctggcgggcggttccggcacccgattgcatccgattacgcgcggcgtaagcaagcaactgttgccgatttacgataagccaatgatttactatccgctgagcgtgctgatgctggccggtatccgcgaaattctcatcatcactacgccggaagataaaggttatttccagcgcctgctgggcgatggtagtgagttcggtatccagctggaatatgccgaacagcccagcccggacggtctggcgcaggcctttatcatcggtgaaaccttccttaatggtgaaccttcttgtctggtgctgggcgataacatcttcttcggtcagggcttcagtccgaagctgcgtcatgttgcggcgcgcaccgaaggggcgacggtttttggctatcaggtgatggacccggaacgctttggcgtggtggagtttgacgacaatttccgcgctatcagcctggaagaaaagccaaaacagccgaagagtaactgggcggtgaccgggctttatttctacgacagtaaagtcgtggagtacgcaaagcaggtgaagccgagcgagcgtggtgaactggagattacctccatcaaccagatgtacctcgaggcgggcaacctgaccgttgaactgctcgggcgcggatttgcctggctggataccggcactcacgacagcctgattgaagccagcacctttgtacagacggtggaaaaacgccagggctttaagattgcctgcctggaagagattgcctggcgtaacggctggctcgatgacgagggtgtgaagcgtgctgccagtagtttagcgaaaactggctacggccaatatctgctggagttacttcgtgcccgtccgcgccagtattgagccactaacctgggaaaacgccttctttggtgttaacagcgccatcgtgcgcattacgtctgaagcaccgctcctgacgccagacgcgttagcgccgtggtcacgggtgcaggccaaaattgcggcaagtaatacgggtgaactggatgccctgcaacagctgggattctccctggtagaaggtgaagttgatttggcgctacccgtgaacaatgccagtgatagcggtgctgtagtggcacaagagaccgatattcccgcattacgtcagttagccagcgccgcatttgcgcaaagccgttttcgtgcgccgtggtatgcgcctgacgccagcagtcgcttttatgcacagtggattgaaaatgccgtgcgcggcacctttgatcatcaatgtctgattttacgtgcggcgtccggcgatattcgcggctatgtctctttacgggaactcaatgcgacagatgcgcgaattggcctgctggctggacgcggtgcaggtgctgagctgatgcaaacggcgctaaactgggcgtatgctcgcggtaaaacaactttgcgggtggcgacccaaatgggcaacaccgccgcgcttaaacgatacatacaaagtggtgcgaatgtagaaagcaccgcgtactggttatacaggtgatcacatgattccatttaacgcaccgccggtggtgggaaccgaactcgactatatgcagagcgcaatgggtagcggcaaactgtgtggcgatggcggttttacccgtcgctgccagcagtggctggagcaacgttttggcagcgccaaagtgttactgacgccgtcctgcaccgctagcctggagatggcggcgctgctgctcgatatccagcctggcgatgaagtgatcatgccgagctacacctttgtctccaccgccaatgcctttgtgctgcgtggcgcaaaaatcgtttttgtggatgttcgcccggacaccatgaacatcgacgaaacgctgattgaagcggcgatcaccgacaaaacgcgcgttatcgtgccggtccattacgcgggtgtggcctgcgaaatggacaccattatggcgttggcgaaaaagcataatttgtttgtggtagaagatgccgctcagggcgtgatgtccacttacaaagggcgtgcactgggaaccattggtcatattggctgctttagcttccatgaaaccaaaaactacacggcgggcggtgaaggcggcgcgacgctgattaacgataaagcgttaatcgaacgagccgagatcatccgtgaaaagggcactaaccgcagccagttcttccgtggtcaggtcgataaatatacctggcgcgatattggctccagctatttgatgtccgatctgcaagctgcatacctgtgggcgcaactggaagcagcggatcgtatcaaccagcaacgtctggcgctgtggcaaaactactacgatgcgttagcgcctctggcgaaagccgggcgtatcgagctgccgagcattcccgatggctgcgtgcagaacgcgcatatgttctacattaaactgcgggatattgatgaccggagcgcgttgattaactttctgaaagaagcggaaatcatggcggtgtttcattacattccgctgcacggttgccctgcgggggaacactttggtgagttccacggtgaagatcgctacaccaccaaagagagcgagcgcctgctgcgcctgccgctgttctacaacctgagccccgtcaatcagcgtacggtaattgcgactttgttgaactacttttcctgatatgagcttggcaaaagcgtccttgtggacggcggccagtacactggtcaagattggtgccgggttactggtcggtaagttgctggcggtgagttttggtccggcggggcttgggctggcggcaaatttccgccagttgattaccgtgctcggcgtgcttgccggggctggcatctttaacggtgtaaccaaatacgttgcccagtaccatgataatccgcaacagctgcgccgcgtggtcggcactagtagtgcgatggtacttggtttctctacgctgatggcgctggtttttgtgctggcagctgcgccaatcagccagggattgtttggtaataccgactatcaggggctggtgcgtttagtggcgctggtgcaaatggggatcgcctggggcaacctgttactggcgctgatgaaaggctttcgcgatgccgcaggtaatgcgttaagcctgattgtcggcagcttgattggcgttctcgcgtactacgtcagttaccgtttgggcggttatgaaggggcgttgctgggtctggcgctgattcccgcgctggtggtaattcctgccgccatcatgttgatcaaacgtggtgtcatcccgttaagctatctgaaacccagctgggataacggtctggcagggcagttgagcaaatttacgctcatggcgttgattacgagcgtgaccttgcctgttgcttacatcatgatgcgtaaactgctggcggcgcagtatagctgggatgaggtggggatctggcaaggggtgagcagtatttccgatgcctacctgcaatttattacggcaagcttcagcgtatatttgctgcccacgttgagccggctaacggaaaagcgcgatatcacccgggaagtggttaaaagcctgaaattcgtcttaccggcagtggcggcggcgagttttaccgtctggctgctgcgtgattttgctatctggctgctgttgagcaataaatttaccgctatgcgcgatctctttgcctggcagttagtgggtgatgtgttaaaagtgggcgcttatgtctttggttatctggtgatcgccaaagcgagtctgcggttttatattctggcggaagtcagccagttcactttattgatggtatttgcccactggctaatccctgcgcatggtgcactgggcgcggcgcaggcatatatggcaacttatatcgtctatttttctctttgttgtggcgtgtttttactctggcgtaggcgggcatgactgtactgattcacgtactgggaagcgatatccctcaccataaccgaaccgttttgcggtttttcaatgacgcgctggccgcgacgagcgagcacgcgcgcgagtttatggttgttggcaaggacgacggcttaagtgatagctgtccggcgctttctgtgcaatttttccctgggaaaaaaagcctggcggaagcggtcatcgcgaaagcaaaagctaaccgtcagcagcgttttttcttccacggtcagttcaatcccacactgtggctggctctgctgagtggtggcattaagcccagccagtttttctggcatatctggggggcagacctgtatgagctttccagtggcttgagatataagcttttttacccactacgtcgcctggcgcaaaagcgagtcggctgtgtatttgccacccgcggcgatttgagcttttttgccaaaacgcacccaaaggtgcggggcgaactgctgttcttcccgacgcggatggaccctagcctcaatacgatggcgaacgatcggcaacgtgaagggaaaatgaccattctggtggggaactccggcgaccgcagcaatgagcatattgctgccttgcgcgccgttcatcagcaatttggcgatacggtaaaagtggtggtgccgatgggatatccgcctaataacgaagcgtacattgaggaagttcgtcaggcggggctggagttattcagcgaagaaaatctacaaattctgagcgaaaaactggaatttgacgtctatctggcgctacttcgtcagtgcgatcttggttactttatttttgcccgccagcagggcattggtacgctgtgcttactgattcaggcgggcattccttgtgtgcttaaccgggaaaatccgttctggcaggatatgacggaacaacatttgccggtgctgtttactaccgacgatctcaacgaggatattgtgcgtgaagcgcagcgccagttggcgagcgtggataaaaacaccattgccttctttagccctaactatctacaaggctggcagcgggcgttggcgattgccgccagggaggtcgcatgagtctgctgcaattcagtggcctgtttgttgtctggctgctctgcacgctgtttattgccacgctgacctggtttgagtttcgccgtgtgcgctttaacttcaatgtcttctttagtttgctgtttttgctcacctttttcttcggcttcccgctgaccagcgtgctggtatttcgctttgatgttggtgtcgcgccgccagaaatcttgttgcaggcgttgctttctgcgggctgcttctacgcggtttactatgtcacctacaaaacccgcctacgcaaacgcgttgctgatgtaccgcgccgtccgctgtttaccatgaaccgcgtggagaccaatcttacgtgggtgatcctgatgggtatcgcgctggtaagcgtcggcatcttcttcatgcacaacggctttttgctgttccggcttaactcctacagtcagatcttttccagtgaagtctccggcgtggcgttaaaacgcttcttttactttttcatcccggcgatgctggtggtctactttctgcgccaggacagcaaagcgtggctgtttttcctcgtcagcacggtcgcctttggcttgctgacttatatgattgtcggcggcactcgcgccaatatcatcatcgcattcgctatcttcctgtttattggcattattcgcggctggattagcttgtggatgctggcggcggcgggcgtgctggggattgttggcatgttctggctggcactaaaacgctatggaatgaatgtgagcggcgatgaagcgttctatacgtttctctatctcactcgcgacaccttcagcccgtgggagaatctggcgttgctgttgcagaactacgacaacatcgacttccagggcctggctccaattgtccgcgatttctatgtctttatcccttcctggctgtggccgggtcgcccgagtatggtgctgaacagtgccaactactttacctgggaagtgctgaataaccactccggactggcgatcagccctacgcttataggcagtctggtggtgatgggcggcgcgttgttcatcccgctcggggcgatcgtggttggtctgatcatcaaatggttcgactggctgtatgagctgggcaaccgcgagcctaatcgctataaagctgcgatattgcacagtttctgctttggggcgatcttcaatatgatcgtgctggcgcgtgaagggctggatagctttgtcagtcgcgtggtcttttttatcgtggtcttcggcgcatgtctgatgatcgcaaaactgttgtactggctttttgaaagcgccggactcattcataaacgtacaaaaagtagcctccggacgcaggttgaaggataacaatgaataacaacaccacggcaccaacctatacgctgcgtggcttacagttgattggttggcgtgatatgcagcacgccctcgattatctgtttgctgacgggcagcttaagcagggaacgctggttgccattaatgctgaaaaaatgctgactattgaagataacgccgaggtcagggagttaattaacgctgccgaatttaaatatgcggatggcatcagcgttgtacgtagtgtacgtaaaaagtacccgcaggcgcaggtttcccgcgttgccggtgccgatctctgggaagagctgatggcgcgcgcaggcaaagaagggacgccggtatttcttgtgggcggtaaacctgaagtgctggcgcaaactgaagctaaactgcgcaaccagtggaatgtgaatatcgttggcagtcaggatggttattttaaacccgagcagcgtcaggcgctgtttgaacgcattcatgccagcggtgcgcaaatcgtcaccgttgcgatgggaagcccaaagcaggagatcatcatgcgcgactgccgtctggtacatccagatgcgctgtatatgggcgttggcgggacttacgatgttttcaccggtcacgtaaaacgcgcaccgaaaatctggcaaacgctggggctggagtggctctaccgcctgcttagccagccgagccgcattaagcgtcagcttcgtttgctgcgttatttacgctggcactacaccggcaacctatgattttcctctctttgtaaagcgacggagtggtcactccgtcgcctgtctgcttttttattacacaaagcattcaaatttttaatgctttatttgccatttctcctgaattacgaaaacatttgcaacactcgatgtacccataacgataaccggtaacaccggaaagcatgcaaacacaacacgaggatttatggcagataacaaaccagagctacagcgtgggctggaagctcgacatatcgaactcatcgccctggggggcaccattggcgtcggcctgtttatgggggccgccagtaccctgaaatgggccgggccatccgtattgttggcctatatcatcgccgggctgttcgtctttttcatcatgcgtagtatgggcgaaatgttgttcctcgaaccggttaccggtagcttcgccgtttatgcgcatcgttatatgagcccgttctttggctatctcaccgcctggtcttactggtttatgtggatggcggtggggatctctgaaatcaccgccattggcgtttatgtccagttctggttcccggagatggcgcagtggatacccgcattgatcgcagtggcgctggtggcgttggcgaatctggcggcggtgcggttgtacggcgaaatcgagttctggttcgcgatgatcaaagtcaccacgattatcgtgatgattgtcattggcctgggcgtgattttctttggctttggcaatggcgggcagagcattggttttagcaatctcacagagcatggcggtttctttgcgggtggctggaaagggttcctgaccgctctgtgtattgtggtggcgtcctaccagggcgtggagctgattggcattactgccggtgaagcgaagaatccgcaggtgacgctgcgcagtgccgtaggcaaggtgctgtggcggatcctgattttctacgtaggcgcgattttcgttatcgtcaccatcttcccgtggaatgaaataggcagcaacggcagcccgttcgtactgacttttgccaaaatcggtattaccgcagcggcgggcattatcaactttgtggtgctgacggctgcgctctctggctgtaacagcggcatgtacagttgcggacgtatgctctacgcactggcgaaaaaccgtcagttaccggcggcaatggcgaaagtttcccgtcacggcgtaccggttgcgggtgtggcagtatctattgctattctgctaattggcagttgcctgaactacatcattcccaatccgcagcgtgtgtttgtctacgtctacagtgccagcgtgcttccggggatggtgccatggtttgtgatattgataagccagctgcgttttcggcgtgcacataaagcggcgattgccagccatccgttccgcagtatcctgttcccgtgggccaattacgtaacaatggcattcctgatttgcgttttgatcggcatgtactttaatgaagatacgcgtatgagcctgtttgttggcatcatctttatgctggcggtgacggcgatttataaagtttttggccttaatcgccacgggaaagcgcataaactggaggaataagcagcaaaacgcacaaaccgtaaccaaacgcgcaatttatttaaaaagggactagacagaggggtgggaagtccgtattatccacccccgcaacggcgctaagcgcccgtagctcagctggatagagcgctgccctccggaggcagaggtctcaggttcgaatcctgtcgggcgcgccatttagtcccggcgcttgagctgcggtggtagtaataccgcgtaacaagatttgtagtggtggctatagctcagttggtagagccctggattgtgattccagttgtcgtgggttcgaatcccattagccaccccattattagaagttgtgacaatgcgaaggtggcggaattggtagacgcgctagcttcaggtgttagtgtccttacggacgtgggggttcaagtccccccccctcgcaccacgactttaaagaattgaactaaaaattcaaaaagcagtatttcggcgagtagcgcagcttggtagcgcaactggtttgggaccagtgggtcggaggttcgaatcctctctcgccgaccaattttgaaccccgcttcggcggggttttttgttttctgtgcatttcgtcaccctcccttcgcaataaacgcccgtaataactcattgccccacggtatgatttcgcccttaacgtattgaaggatgacttcaggcaaggagcgaccatgctgcaacaggttccaacgcgtgcttttcatgtgatggcgaaaccgagcggttccgattgtaatctgaactgtgactactgtttttatctcgaaaaacaatccctttaccgcgaaaagccagtcacgcatatggacgatgacacgctggaagcgtatgtccgtcactatatcgctgccagcgaaccgcaaaacgaagtggcttttacctggcagggcggcgaaccaacgctactcgggctggcgttttaccgccgtgccgtagcgctacaggcgaaatatggtgctggcaggaagataagtaacagcttccagactaacggcgtgctgctggatgacgaatggtgcgcgtttctcgcggagcatcattttcttgttggtttaagcctggatggcccgcctgagatccacaatcaatatcgcgtgactaaaggtggcagacccacgcataagctggtgatgcgtgccctgacgctcctgcaaaaacatcatgtcgactataacgtgctggtctgcgttaatcgcaccagcgcgcagcaaccgttgcaggtatatgattttttgtgcgatgcgggagtcgaattcatccagtttattccggtggtcgagcgcctggctgatgaaacaactgcccgcgatggacttaagttacatgcgcctggtgatattcagggtgagctaacggaatggagcgtgcgccccgaggagttcggtgagtttctggtggcgatattcgaccactggatcaaacgcgacgtcggcaagattttcgtgatgaatatcgaatgggcgtttgccaattttgtcggtgcgccgggtgcggtttgccatcatcagccaacctgtgggcgcagcgtgattgttgagcacaacggcgacgtttacgcctgtgatcactatgtttatccgcaatatcggctggggaatatgcaccagcaaacaattgcagaaatgatcgattccccgcaacagcaggcgtttggtgaagataaatttaagcagttaccggcgcagtgtcgcagttgtaacgtgttaaaagcgtgctggggaggctgcccgaaacaccgcttcatgctcgatgccagcggcaaaccgggactgaattatttgtgtgccgggtatcagcgttatttccgccatctaccgccatatcttaaagcaatggctgatttgctggcgcacggtcgcccggccagcgacattatgcatgcgcatttgctggtggtgagtaagtaaaaatcggcggccgcctgcggttgattgccggatgcggcgtaaacgccttatccggcctacatgatcgtgcaaattcaataaattgcagcgttctgtaggctggataagatgcgtcagcatcgcatccggcaaaggcagatctcagcgatagcgccggcttagtcagatttaatctgcgcgcgtggtggatattttttcaggatctccatatacgcgtgcatttcggtctgtagcggtacacccatcggaatatggcgcacgccgatggagtcgctttcctgcggatcggtgtagaggttaaacacgctgcttcccgccgtttgcattactgtgccggtgaatccaccctgatatccgctctgggtataagcgtaaggttgctgaatcaggacgtgatacttgaactcatccatacgcacagcagcgagtttaccgttgaggaagtagtgctcggccttacggttagactgaccatttgttcccaggaagaaggatgtctggtccacaccatcgataaaggtggttttcggcactaaattcgccactttcgctccaggatgccctgccagatccagcgcggtagggaagagatctgccagatcgacaataccgtcagatttacgcggttggatcatccctttccagtaaacgaaagtcggtacgcgaacgccgccttcccaggtgctacctttcgcaccacggaacggggtgcgtccgtgcggcggtacttcggcttccggtccgttatcggaggtaaagacgatcagcgtgttatcaagctgaccgtttttctccagtgttttatacagattagcgaacacatcgttcatctccaccatgcagtcgccatagctggtgcgtgccggagagctacccgcatatttcgcatttgggtagttatcgaagtggcagccacgagtgccgtagtagaggaagaatggtttatcgctcttcgccatcttgtcgaggaacttaacgccatagtccatccagcgttgatccagatcttccatatatttcggcgtaatgtcggcaatggcctgttgttcgccgccgcgcaccgcatgaacgtcatctttgctgaacggtaattgcttgatgtattcagaacggtccggactcagggccacttccggattgacgtgaacgtcgcgccattcggtgtacatatcagacacgctgttaaagccacggaaatcatcaaagccaacgttctgcggctggctctctttgttttcccccatatgccattttccgatggcctgagtgacgtagccctgatcgtgcagcaactgcggcagcgtggttaacccttgcagcccgcccggttgcccgtacattggcggcatcagaatgccgtggtggatggagtattgtccggtgagaatggtggcgcgggttggggaagagcttggttgagaatacgcgctagttaaaatcagcccctggctggcaacggcgtcgatatctggtgtagggttacccaccgccacgccgccaccgttaaaaccgacgtccatccagcccacatcgtccagcaagaaaacaaccacattcggtttcttaccggtttttttctcaagttctgccagcttctgctgggtttctttatcctgcgccggatgctgcattactggcatcatattgtcggcaatagtggtcgccggtttaaccagatactggtttgggtgatcgtatccggcaaagcctttgcgtgcggtggcagtactcggggtatctgctgcgctggccatgagaggaagagcggcggcgacagcaacaacaagacgtttgggactaaagctaaattccatgcaaaatgctccggtttcatgtcatcaaaatgatgacgtaattaagcattgataattgagatccctctccctgacaggatgattacataaataatagtgacaaaaataaattatttatttatccagaaaatgaattggaaaatcaggagagcgttttcaatcctacctctggcgcagttgatatgtaaggcaggtttattatatcgcgttgattattgatgctgtttttagttttaacggcaattaatatatgtgttattaattgaatgaattttatcattcataataagtatgtgtaggatcaagctcaggttaaatattcactcaggaagttattactcaggaagcaaagaggattacagaattatctcataacaagtgttaagggatgttatttcccgattctctgtggcataataaacgagtagatgctcattccatctcttatgttcgccttagtgcctcataaactccggaatgacgcagagccgtttacggtgcttatcgtccactgacagatgtcgcttatgcctcatcagacaccatggacacaacgttgagtgaagcacccacttgttgtcatacagacctgttttaacgcctgctccgtaataagagcaggcgtttttttatgtatcaggaaggccccggaggtgcttgcctccgggtgagaaggaattactgtggcgggttattctgcaacgttaacatcaaaccgtcgcgacgcatagctgcagcttcttccggcttgtgcagtctgtccagcgcgtcggcaagccatgcgtaatcgtaggcgtccggacgttgtttcagcgctgcgcggaaggcgaggcttgcttcctgccattctccgtgcttcatcagactctggcccagtgtgctccacaacagcgggcgatcgccgacgtttttgatttgctggcgcagcactttttccagctgttccggattgtttgttttcagtcgaggaatcggcagcagtaggcgatcgtcgtactggcgtttcaggccatcgatgataatttgctgggcagtatcatgatcgtcacattcaataagatgttccgccattgccacctgcaacgctacctgatgacgcgttttccggctttggtttttccaccagttacgcaaaccttcgctaccgttatcggcacgcgcctgatccatcaggccaatccatgcctgttgttccagcattgcacgatgttcttcatcaccaacatgggctttcgccatacttgggataatatccagcaggctactccatgcacctgtgcggatatacgcctgttccgccagacgtaatacttccggatggcgtggcgtaacttccagcagcttatccacgccgtggcgtgcagcatggttttcattacgggccagttgcagacgtacgcgggtgatttctaccggaatggtgtcgttgccggccagctccgctgcgcgttccagatgttggttggcgcgtgcttcatcaccacgttgttgcgcggcttcggcagccagtagatagttcaccaccggttgttccgcgtgatcggcatttttcgccatcagcttttcaacttgctgataatcgccttccgccagtttcagcagcgcctgttcggtctgcttacgtgcacggcgacgcttacgtccgacaaaccacccacgggtgtgcgcgccagtgcggaagatccgccgcagtagccactcaatggcaaacagcactaccatcgccagaatcaatatgatcgccaggcccgtgacgctggtttcgatattgtagttgtcggtctggatcagcacataaccctgatggccggcaatcatcgggccaaccacgatccccgcaatcagcaacacaaagagcaataacacttttagcatggttattctccttgcggcgcggctgccggagtatcagcttgcggtgcaggtgcaggtttagcttccgttgtccccgctgccggttgtgccagcaggttacgcacgcgagtctgcatcagtttttccagcatcgcctggctttgcagggtttccggaagatccatgctgatattttgctggcttaactggtccacctcgtcgaggaacgctttggtggtggcatcatcagtatcgtagtaagcacgtacccaggtggagacgttctccagcgcctggcgataagtctcttcctggtgacgcggtacagcttgtgctgcgaccagcaggcgagagcgaatattttcgcgcagatagatatcctgatttggcgctaacagcggtacggcggtgtcatcacgacggcgaatcgtaatgaagttgtccataaagttctgccagcttttttgcagattgatacgccattcgctgatggaactggaaagctcttcaccgtcactatccatcgggctaccatcgctgtcattatcggccagacgcaggttatctacctgattactaagctgattaagcttaaggatgatgccgtcataatccacctggcttactgcagaaaggctggcgatatcatcggtaattgcccgacgaacggtaatcagactcgggtcattcatatccgccaggctggcgtctgcacttttcagcaacgctgcagcggtcgtgacgtcctgatcgctccacagcttccgtccggcgagtttcaccagaaaatcggcctgagccagcagccaggttttagcatcgctgccggaaatggtggcgaccttttgttggacttcatccaactgttttgccagcgtttcttgctgacgattcgcctgcttaagttgtgcagcttgttgcttaataatgccttccagctcggctttttggctctcctgggctttttgcaatgccgtcagttggttagccagggcatcgctggtggcggtctgattgacggcctgttgtttaccccagccatacaaaccgatgcccgccgccagagcaatagcgatagccaccgcgctgagaatcaatgcggtattgttcttactctttttttctgttgcgacaggttgactcgtggtgtccacggcctccctggtctcttcaaccacggcggaggttttttcttgttccgtcattatggcttcctgttatgagagttattgtaatgcccgtaaaagcgcatcgttgtcagcgttatcggcgaccttaatgtcttgccagcccagttcccgggcgagtttcgccaaacgctcactgacgaccaatagtcgacagtgtagtaaccagtgctcacgataccattgtgggatcaggctccagagttgctgcaacatttcaccgctggtaacaacgaccatcgtcacctcgcgggcttgccagcgcatcgcttcttctgcaccatcgtaatggattgcgcatcgttgataacattcacaaaaagtgacctcagcaccgcgcgccgtcagggtatccccaattagctcacgaccaccattgccacgtaatatcagcgcacgtttgcccgcaatattttgtaattcaggtaattgtagcaagacttcgctgatttcccgatcctgcgggtagagaatcttctgtccacttacggtatgtagtgccagtgcggtggtgcgtccaatggcgaaataatcaggtagtcggggccatttacgatcttgctgatgcagctgactttgggcaaaagcaaccgcgtgttggctgagggcaaacaacagatcgctctcccccagcgctgccagttgatcagcaagttgcggtaattgttgacccggagaaaactcaatcagcggaaaatgccaggccacctgccccagtgtgcgcagacggctcactaactcttctccagcgggagacgggcgggtgacaaggatactcatgccggggcgtctccgttatagacttcagcgaggatctcgcgcgcgccgttattcagtagctcttctgccaggctaatccccatttgttcggcatcttgcggcgcaccgcggcgttcaccgcgaataatctggctaccgtccggcgcgccgaccagcgcacgcagccagatttcgccatcaataagctcggcgtagctaccaattggcacctgacatccgccttcgagacgggtattcatggcgcgttctgcggtaacgcgcagtgcagtttcgtggtgattcagcgcggcaagcagctcgcgagtgcgactatcatcaaggcggcattcaatacccaccgcaccttgtcctaccgccggaagagaaatctcgggtggcaacgcggcgcgaatacgactctccagacctaaacgttttagtccggctacggcaagaatgatggcatcgtattcgccgttatccagtttgctcaggcgagtgccgacgttgccgcgcagggagcggataatcagatccggacggcgttcagccagttggcactggcgacgtaaactggacgtcccgacgatactgcctgccggtaacgcatccagactgtcatagttattggacacaaaggcatcgcgaggatcttcacgctcacaaatagtgaccagtcccagaccttgcgggaattcaaccggcacatctttcatactgtgtacggcgatatcggcgcgattttcgaggagcgcgacttccagctcttttacaaataagccttttccgcctactttcgccagcggcgtatcaagaatcacatcgccgcgcgtcaccatcggtaccagttcaacgaccaggcccggatggctcgccatcaacttgtctttgacatagtgtgcctgccagagtgcaagtgggctttggcgtgtggcaattcttaaaacattgtctaacatgcttgttaccgtcattatcatccgtggtccatcctaacatccttgccagagtgatgtcagtgttgtggtgaaacgtagacgcctgcgcaaaccgtaaaatgaggtctggcagtggatcctgacaggcgtttcacgccgttgtaataaggaatttacagagaataaacggtgctacacttgtatgtagcgcatctttctttacggtcaatcagcaaggtgttaaattgatcacgttttagaccattttttcgtcgtgaaactaaaaaaaccaggcgcgaaaagtggtaacggttacctttgacatacgaaatatcccgaatgccgcgtgttaccgttgatgttggcggaatcacagtcatgacgggtagcaaatcaggcgatacgtcttgtacctctatattgagactctgaaacagagactggatgccataaatcaattgcgtgtggatcgcgcgcttgctgctatggggcctgcattccaacaggtctacagtctactgccgacattgttgcactatcaccatccgctaatgccgggttaccttgatggtaacgttcccaaaggcatttgcctttacacgcctgatgaaactcaacgccactacctgaacgagcttgaactgtatcgtggaatgagtgtacaggatccgccgaaaggtgagcttccaattactggtgtatacaccatgggcagcaccagctccgtagggcaaagttgttcctctgacctggatatctgggtctgtcatcaatcctggctcgatagcgaagagcgccaattgctacaacgtaaatgtagcctgctggaaaactgggccgccagcctgggtgtggaagtcagcttcttcctgattgatgaaaaccgcttccgtcataatgaaagcggcagcctggggggcgaagattgtggctccacccagcatatactgctgcttgacgaattttatcgtaccgccgtgcgtctcgccggtaagcgtattctgtggaatatggtgccgtgcgacgaagaagagcattacgacgactatgtgatgacgctttacgcgcagggcgtgctgacgccaaatgaatggctggatctcggtggcttaagcagcctttctgctgaagagtactttggtgccagcctttggcagctctacaagagtatcgattccccatacaaagcggtactgaaaacactgctgctggaagcctattcctgggaatacccgaacccacgtctgctggcgaaagatatcaaacagcgtttgcacgacggcgagattgtaagctttggtctcgatccatactgcatgatgctggagcgtgttactgaatacctgacggcgattgaagattttacccgtctggatttagtacgtcgctgcttctatttaaaagtgtgcgaaaagctcagccgtgaacgcgcctgcgtaggctggcgtcgcgcagtgttgagccagttagtgagcgagtggggttgggacgaagctcgtctggcaatgctcgataaccgcgctaactggaagattgatcaggtgcgtgaggcgcacaacgagttgctcgacgcgatgatgcagagctaccgtaatctgatccgctttgcgcgtcgcaataaccttagcgtctccgccagtccgcaggatatcggcgtgctgacgcgtaagctgtatgccgcgtttgaagcattaccaggtaaagtgacgctggtaaacccgcagattagtcccgatctcagcgaaccgaatctgacctttatttatgtgccgccgggccgggctaaccgtagtggttggtatctgtataaccgcgcgccaaatattgagagcatcatcagccatcagccgctggaatataaccgttacctgaataaactggtggcgtgggcatggtttaacggcctgctgaccagccgcacccgtttgtatattaaaggtaacggcattgtcgatttgcctaagttgcaggagatggtcgccgacgtgagccaccatttcccgctgcgcttacctgcaccgacaccgaaggcgctctacagcccgtgtgagatccgccatctggcgattatcgttaacctggaatatgacccgacagcggcgttccgcaatcaggtggtgcatttcgatttccgtaagctggatgtcttcagctttggcgagaatcaaaattgcctggtaggtagcgttgacctgctgtaccgcaacagctggaacgaagtgcgtacgctgcacttcaacggcgagcaaagcatgatcgaagccctgaaaactattctcggcaaaatgcatcaggacgccgcaccgccagatagcgtggaagtcttctgttatagccagcatctgcgcggcttaattcgtactcgcgtgcagcaactggtttctgagtgtattgaattgcgtctttccagcacccgccaggaaaccgggcgtttcaaggcgctgcgcgtttctggtcaaacctgggggttgttcttcgaacgcctgaatgtaagcgtacagaaactggaaaacgccatcgagttttatggcgcgattagccataacaaactgcacggcctgagtgtgcaggttgaaaccaatcacgtcaaattaccggcggtggtggacggctttgccagcgaagggatcatccagttctttttcgaagaaacgcaagacgagaatggctttaatatctacattctcgacgaaagcaaccgggttgaggtatatcaccactgcgaaggcagcaaagaggagctggtacgtgacgtcagtcgcttctacagcagtagccatgaccgttttacctacggcagtagcttcatcaacttcaacctgccgcagttctatcagattgtgaaggttgatggtcgtgaacaggtgattccgttccgcacaaaatctatcggtaacatgccgcctgccaatcaggatcacgatacgccgctattacagcaatattttagctgatgaacgtgccggaaagcgaggcttatccggcatgcaatcttagcggaaactgactgtttcacccgcctgctgcgtcgccgcctgttccagcaaatcccagaaggtttcgccgctgcgatcacaaatccactcatcgcctttcaggtcaaaatggtagccgccctgtttggttgccagccatacctggtgcagcggctcctggcggttgataatgattttgctgccattctcaaaggtaatggtcagtacgccgccgttgatttcgcagtcgatatcgctgtcgccatcccagtcgtccaggcgttcttcaatggtcagccagagttgatcagccaggcgatgaaattcactgtcgttcattgttgtatcctgtttttaagtgatggcggcagtatagcggcatggggtcagggcttcaaagtttgcacctctgcggctgcgttccggcacgatagttccgtcaccggaataatgatgtctctgtgtagcgaaagatttgtctctagtttagggcgcagttacaccacgtctttccctgtttctggtaaacattatgatcaggtttaccgagcgagcatcctcacgctgacggaactaaaaaagacaacaaacaaaccacattgcgatagtgcataaagccatcctggcgcgaggtgccgatcacgaaactaccagcaaaacataaatccccacgagtaagcgttatactcgcagcatttcctcacttttcagacttcataaagagtcgctaaacgcttgcttttacgtcttctcctgcgatgatagaaagcagaaagcgatgaactttacaggcaatccataatgaaaaacgtgtttaaggcactcactgtattacttactctcttcagcctgacgggctgcggtctgaaaggtccgctctatttcccgcctgcagataaaaacgcaccgccgccgaccaaaccggtagagacgcaaacgcaatccacggtgccggataaaaacgatcgcgccactggcgatggtccatcccaggtgaattactaaaagtcagtttctgtacccgcgtgattggagtaaatgatgcagttcagcaaaatgcatggccttggcaacgattttatggtcgtcgacgcggtaacgcagaatgtcttttttagtccggagctgattcgtcgcctggctgatcggcacctgggggtagggtttgaccaactgctggtggttgagccgccgtatgatcctgaactggattttcactatcgcattttcaatgctgatggcagtgaagtggcgcagtgcggcaacggtgcgcgctgctttgcccgttttgtgcgtctgaaaggactgaccaataagcgtgatatccgcgtcagcaccgccaacgggcggatggttctgaccgtcaccgatgatgatctggtccgcgtaaatatgggcgaacccaacttcgaaccttccgccgtgccgtttcgcgctaacaaagcggaaaagacctatattatgcgcgccgccgagcagacaatcttatgcggcgtggtgagcatgggaaatccgcattgcgtgattcaggtcgatgatgtcgataccgcggcggtagaaacgcttggtcctgttctggaaagccacgagcgttttccggagcgcgccaatatcggttttatgcaagtggttaagcgcgagcatattcgtttacgcgtttatgagcgtggggcaggagaaacccaggcctgcggcagcggcgcgtgtgcggcggttgcagtagggattcagcaaggtttgctggccgaagaagtacgcgtggaactccccggcggtcgtcttgatatcgcctggaaaggtccgggtcacccgttatatatgactggcccggcggtacatgtctacgacggatttattcatctatgaagcaaccaggggaagaactgcaggaaacactcacggagcttgatgaccgggcggttgtcgattatctgattaaaaatcctgagttttttatccgtaatgcgcgcgcagtagaagcgatacgtgtgccgcatccggtacgcggcaccgttagcttggtcgagtggcacatggcccgcgcacgtaatcatattcatgttctggaagagaacatggcgctgttgatggaacaggctatcgccaacgaaggcctgttttatcgcctactctacctgcagcgcagtctcaccgccgccagcagtctcgacgatatgctgatgcgctttcaccgctgggcgcgcgatctcggcctggcaggtgcgagtctgcgcctgtttccggatcgctggcgcttaggtgcgccgagcaaccacactcatctggcattaagccgtcagtctttcgaaccgctgcgtattcagcgtttggggcaggaacagcactatcttgggccgcttaacggaccagagctgctggtggtgctaccggaagcgaaagcggtgggaagcgtggcgatgagcatgctgggaagcgatgctgatttgggtgtcgtgctgtttaccagtcgcgatgccagtcactatcaacaagggcaaggaacgcagttacttcatgaaattgcgctgatgttgccggagcttctggagcgttggattgaacgcgtatgaccgatttacacaccgatgtagaacgctacctacgttatctgagcgtggagcgccagcttagcccgataaccctgcttaactaccagcgtcagcttgaggcgatcatcaattttgccagcgaaaacggcctgcaaagctggcagcaatgtgatgtgacgatggtgcgcaattttgctgtacgcagtcgccgtaaagggctgggagcagcaagtctggcgttacggctttctgcgctacgtagcttttttgactggctggtcagccagaacgaactcaaagctaacccggcgaaaggtgttagcgcaccgaaagcgccgcgtcatctgccgaaaaacatcgacgtcgacgatatgaatcggctgctggatattgatatcaatgatcccctcgctgtacgcgaccgtgcaatgctggaagtgatgtacggcgcgggtctgcgtctttctgagctggtggggctggatattaaacacctcgacctggagtctggtgaagtgtgggttatggggaaaggcagcaaagagcgccgcctgccgattggtcgcaacgctgtggcgtggattgagcactggcttgatttgcgcgacctgtttggtagcgaagacgacgcgctttttctgagcaaactgggcaagcgtatctccgcgcgtaatgtgcagaaacgctttgccgaatggggcataaaacaagggctgaataatcacgttcatccgcataaattacgtcacagcttcgccacgcatatgctggagagcagcggcgatcttcgtggtgtgcaggagctgctgggtcatgccaacctctccaccacgcaaatctatactcatcttgattttcaacaccttgccagcgtgtacgatgcggcgcatccacgcgccaaacgggggaaataatgcgtttttaccggcctttggggcgcatcagcgcgctcacctttgacctggatgataccctttacgataaccgtccggtgattttgcgcaccgagcgagaggcgcttacctttgtgcaaaattatcatccggcgctgcgcagcttccagaatgaagatctgcaacgcctgcgccaggcggtacgggaagcggaacccgagatttatcacgacgtgacgcgctggcgttttcgtagcattgaacaagcgatgctcgacgccgggctgagtgccgaagaagccagtgcaggcgcacacgcagcaatgatcaactttgccaaatggcgcagccgaatcgacgtcccgcagcaaactcacgacaccttaaaacagctggcgaagaaatggccgctggtggcgatcaccaacggtaacgcccagccggagctgtttggtttgggggattattttgagtttgtgctgcgcgctggcccgcacgggcgcagtaaaccgttcagcgatatgtactttttggctgcggaaaaactcaacgtgccgatcggcgagatcttacatgttggggacgatctcaccactgacgtgggtggggcaattcgcagcggaatgcaggcttgttggatcagaccggaaaatggcgatctgatgcaaacctgggacagccgtttactgccgcatctggaaatttcccggttggcatctctgaccagcctgatataatcagcaaatctgtatatatacccagctttttggcggagggcgttgcgcttctccgcccaacctatttttacgcggcggtgccaatggacgtttcttacctgctcgacagccttaatgacaaacagcgcgaagcggtggccgcgccacgcagcaaccttctggtgctggcgggcgcgggcagtggtaagacgcgcgtactggtgcatcgtatcgcctggttgatgagcgtggaaaactgcagcccatacagcattatggcggtgacgtttaccaacaaagcggcggcggagatgcgtcatcgtatcgggcaactgatgggcacgagccagggcggtatgtgggtcggcaccttccacgggctggcgcaccgtttgctgcgtgcgcaccatatggacgccaatctgccgcaggatttccagatcctcgacagtgaagaccagctacgcctgcttaagcgtctgatcaaagccatgaacctcgacgagaagcagtggccgccgcggcaggcaatgtggtacatcaacagccagaaagatgaaggcctgcgtccgcatcatattcaaagctacggtaatccggtggagcagacctggcagaaggtgtatcaggcgtatcaggaagcgtgtgaccgcgcgggcctggtggacttcgccgagctgctgctgcgcgctcacgagttgtggcttaacaagccgcatatcctgcaacactaccgcgaacgttttaccaatatcctggtggacgaattccaggataccaacaacattcagtacgcgtggatccgcctgctggcgggcgacaccggcaaagtgatgatcgtcggtgatgacgaccagagtatctacggctggcgcggggcgcaggtggagaatattcagcgtttccttaatgatttccccggtgccgaaactattcgtctggagcaaaactaccgctctaccagcaatattctgagcgccgctaacgccctgattgaaaacaataacgggcgtctgggtaaaaaactgtggaccgatggcgcggacggtgagcctatttccctctattgcgcttttaacgaactcgatgaagcgcgttttgtggttaaccgcatcaaaacctggcaggacaacggcggagcgcttgccgagtgcgccattctctaccgcagcaacgcccagagccgggtgctcgaagaggcgttattgcaggccagtatgccgtaccgtatttacggcgggatgcgcttcttcgaacgccaggaaatcaaagatgcgctcagctatctgcgcctgattgccaaccgcaacgacgacgcggcctttgagcgtgtggtgaatacgccaacgcggggtattggtgaccggacgctggacgtggtacgtcagacaagccgcgatcgccagttaacactctggcaggcatgtcgtgagctgttgcaggaaaaagccctcgccgggcgagctgccagcgccttgcagcgatttatggaattaatcgacgccttagcgcaggaaactgccgatatgccgctgcatgtacagactgaccgggtaattaaagactccggcctgcgtaccatgtatgagcaggagaagggcgaaaaaggtcagacgcgtatcgaaaacttagaggaactggtgacggcaacgcgccagttcagctacaacgaagaagacgaagatttaatgccgctgcaggcgttcctctcccatgcggcactggaagcaggtgaagggcaggcggatacctggcaggatgcggtgcagttgatgacgctacacagcgcgaaaggcctggagttcccgcaggtgtttatcgttggtatggaagagggcatgttcccaagccagatgagcctggatgaaggcgggcgtctggaagaagaacgccgtctggcctacgttggcgtaacccgcgcgatgcagaaactgacgctgacctacgcggaaacccgccgtctgtatggtaaagaggtttaccatcgcccgagccgctttatcggcgagctgccggaagagtgtgtggaagaggtgcgcctgcgcgccacggtaagccgcccggtcagccatcagcggatgggtacgccgatggtcgagaacgacagcggctacaagctcggccagcgcgtacgccacgctaagtttggtgaaggcaccattgtcaatatggaaggcagcggtgagcatagccgtttgcaggtggcatttcagggccagggtattaaatggctggtggcggcatacgcccggctggagagcgtgtaacgttgccggatgcggtgctgcgcaccttatttggcctaaaaaatcattcagattcaataaattgcaacgtcatgtaggccggatagggcgtttacgccgcatccggcatctgcgccatcttcagtatctgacacaaaactatcgttttaacctttccgctcgacggaaatcatggtgacaaaaggatagcgttgccacgggattgccccgcctttcatatacatatgactaatcgtgccatcaagataaagcagctgctcaacgttcagtttcgctttggcataacaggcaaaatcataaaaatttgttgcctgctggctcaacaaaaacacggcgttcccatgtttattaatcccaacaccgttacgaattttgctactggcgacgttgggatgaatacgcggattaattacaccgttttccatcaacattggcccactctgcaccgcaaactgaatctctttactggttttgaaggcatccagacgaacgatgccgactttatctcccgcgacataaaacacgccgccaggacggataaagaaattcccttcaccactagcgagatttaacgccaccttctgctgaccgttttcgatgtacaaaccgagcggcgcatagctttcatcatagatgccgccgttcatcgccatctgcacctgaccctgactattaatatccgccagcagagcatgtaacgttccccacgcttcgccattggctttttgccagtacattttcacccgctctgtttgaggattaacggtatacgcctgtacggtcagcgtcggatcactgagtgcgcaatcatcagcggcaacagcaaacaagggaagtaaggtgagggcgagaaaaatccgtttgagattcaaggtgatcattcctttaccaatgagtagctgatgcgccattataggtcctggatgtgggatttttttatcctgttagcgaccttgacgagtaccaaaaagcgcgaagttcaactattgttctgtggtgttctgttgcgtgttgacggcaaaattttgctggcgtaacatgcgcgcacgatcactctaagaggacattcgccttggacacacccagtagatactggctcactatcctgtcatccaggatcaactcctaaggctatccctttttgctgatagccttagcggttgtcagcgacctcaatttttcccgtcgcgctgagtcaggctgtttaatggtctgaaacccaatttgtttctgtgtgcccaccgaactgtccgatattttaagcattgggagtcccggtcatgctgagcgcatttcaactggaaaataaccgactgacccggctggaagtcgaagagagtcaaccccttgtaaatgcagtatggattgatcttgtcgaaccggacgacgacgagcgactgcgcgtacaatctgaacttggccagagcctggcaacccgcccggaactggaagacatcgaagcaagcgcacgtttctttgaagacgacgacggcctgcatattcactccttcttcttctttgaagatgcggaagatcacgccggtaactccactgtggcatttaccatccgtgatggtcgtctgtttactctgcgtgagcgtgaactgcccgcttttcgtctgtatcgtatgcgtgcccgtagccagagcatggtagacggtaacgcctacgagttgctgctggatctgttcgaaaccaaaatcgaacagttggcagatgaaattgaaaatatctatagcgacctggagcagttgagccgggtgattatggaagggcatcagggcgatgagtacgacgaggcgctctccactctggcggaactggaagatatcggctggaaagttcgcctgtgtctgatggatacccagcgcgcgctcaacttcctggtgcgtaaagcgcgtttaccgggtgggcaactggagcaggcgcgtgaaatcctgcgagatatcgaatccctgctgccgcataacgaatccctgttccagaaggtgaacttcctgatgcaggcggcaatgggttttatcaacatcgagcagaaccgcatcatcaaaatcttcagcgtggtatccgtggtattcctgccgccgacgctcgttgcttccagctatggcatgaactttgagtttatgccagaactgaagtggagcttcggctaccctggcgcgattatctttatgatcctcgcgggcctggcaccgtatctgtactttaagcggaagaactggttgtaaaaaacgagagcggtggcttagtctggctaagccacctgttattcaaaggctccaggtatttaacccttttacctctttctcatagaaccatttgttcgtgttaacagcaacataggctgctacggcaattcccagaatgttaacgccaattagtgcaccaacaaatagagatagaataccaagtaatagaactataattgcttttttccataaccccaggacaaataaatatatccaggaacagaagaaagcaatgaaattcatttgaatagttaagcgttgtcttacttttaatgctttaaatgctgctttatattctggtgttgccccccagaatccaggaaaaccatgttgatcataaaaattaaatcggtatttccatttttcacttaaactaccatcgttcatatattccttactcataaatactccataattattgtttactactatcagtaggtgcaagcattagcatactgaaagtggaaaaataacaaatcaaaaaaatcatgctaccattgccactacaggcaaaatcttcggctatcattgtgatgatagagatgatatatactgctaatgtaccaaaaacataagtttttatatagatgaaaccactatcacggagtcgctggcaattcatgttgatgacgagataatggagtacgatggtagagactataacaagaaagcctgcttctccatcgttaaaaaagataataagaaaggcaaaaatgaaatttattaaaataaaactaaatatataacgacgtctggaaatcttaccgttagatgttgggataaatatacgtaacataaattttacatccttgtatgagtctccggtcagcatggcaatatgcccactctcatgcaagagtcggcatattttttcagaatatatttattttttatttggacgttctacgctgcgtataaatcgcatccatcacaaaaattgccagcgccacccaaataaaggcgaaagtcaccatcttatcggcacccggtttttcaccataaaacgtcacagccagcaggaacatcagcgtcgggccaatgtactggaaaaagcctaacgtactgagacgcaagcgcgtggcagcggcggtaaaacacaacagcggtacggtagtgacaataccggcggcgatcagcagtaaattcaggctcatcgggttttgccccatatggctggtactgctgtcggcaatagcaaacaggtaaattgccgccacgggcagcagccacatggtttcgattaacatgccggtttgcgcttcaacggcaatcttcttgcgtaccagaccgtagaaggcaaaactaaatgccagtcccagcgcgataataggtaggctaccaaaagtccacagctggactaacacgccacatatcgccagaatcaccgccagccattgcatccggcggaatcgctcgccgaggaaaatcatccccagcacaatgttcaccagcgggttaataaagtaaccaaggctcgcttccagcatatggtgattgttcaccgcccagataaacagtagccagttgccaccaatcagcacggcagagactgccagcataaaaattttctgtggcgtctgaatcagcgtttttaaataggaccactggcggcaaatgctcatcagcaccaccataaagaaaaagctccagatcacgcgatgcgtcaggatttcatcggcgggcacgtagtaaatcaacttgaagtacgctggcgctataccccaaataaaataagcggcaagagcgagtaatacgccctgccgcgtttgttttgcatccatcgggaatactcatttttaattggtaacagcagtttacctgcttttatgtcttcaacctaccatataggtggcggtggcactggcaatataaagctgttcttcattgtgtaattcaacgcgggcgacggcgactttattgcctgcacgcaacaggctactagtagcagtaaaacgctcgcccctgcctgggcgcagataatcaacgcgaagatcaatggtccccatccggcttagccgctggcgtagttcatcttcactgatggtttcgtggcgggttaaggtacttcccacgcacaccagaccggcggcgacatccagcgcgctcgcaatgaccccgccgtgcaaaatgctttgcgcccagttgcccaccatcattggctgatttttaaaggccagctgtgcgaactctttttcgtaacgctccagttccatccccaatgcgcggttaaatggcatgtgataaacaaacatctcacccactaatttcagggcttgttcagcggtcagtacggcagacatatcatccttacacttcattggttaatgaaatgttgattttatgcttctttgttgttggtttctactttaggaagggataactaacggctatggagttaagtatgtaaaatagcccgcagaaaaatattcaccttatcaataattcgttacggagaacacgaccgatgcggactctgcagggctggttgttgccggtgtttatgttgcctatggcagtatatgcacaagaggcaacggtgaaagaggtgcatgacgcgccagcggtgcgtggcagtattatcgccaatatgctgcaggagcatgacaatccgttcacgctctatccttatgacaccaactacctcatttacacccaaaccagcgatctgaataaagaagcgattgccagttacgactgggcggaaaatgcgcgtaaggatgaagtaaagtttcagttgagcctggcatttccgctgtggcgtgggattttaggcccgaacagcgtgttgggtgcgtcttatacgcaaaaatcctggtggcaactgtccaatagcgaagagtctagtccgtttcgtgaaaccaactacgaaccgcaattgttcctcggttttgccaccgattaccgttttgcaggttggacgctgcgcgatgtggagatggggtataaccacgactctaacgggcgttccgacccgacctcccgcagctggaaccgcctttatactcgcctgatggcagaaaacggtaactggctggtagaagtgaagccgtggtatgtggtgggtaatactgacgataacccggatatcaccaaatatatgggttactaccagcttaaaatcggctatcacctcggtgatgcggtgctcagtgcgaaaggacagtacaactggaacaccggctacggcggcgcggagttaggcttaagttacccgatcaccaaacatgtgcgcctttatactcaggtttacagcggctatggcgaaagcctcatcgactataacttcaaccagacccgtgtcggtgtgggggttatgctaaacgatttgttttgatgaacggttgagtggttggcaaatctggaatccagcatccaggattaccctctcagagactaaaagcattgcagtttctcgcgcaggcgctgaaaatagcgcctgtttttatttcaggcaatcggggtgaatgtggcgcaggcggaagtgttgaatctggagtccggagctaaacaggttttacaagaaacctttggctaccaacagtttcgccccggccaggaagaaattatcgacactgtgctttccggccgcgattgcctcgtcgtcatgcccactggtggcggaaaatccctttgctatcaaatccctgccttattgctaaacggccttaccgtggttgttagtccgctgattagcttgatgaaagatcaggtggatcaactgcaagccaacggcgtggcggcggcgtgccttaacagcacgcaaacccgcgaacagcaacttgaagtgatgacaggctgccgcaccgggcaaattcgtctgctttatatcgccccggaacgcctgatgctggataactttcttgagcatctggcgcactggaatccggtgttattagccgttgatgaagcgcactgtatctcccaatggggccacgatttccgcccggaatatgccgcgctcggtcagttgcgccagcggttcccgacgctgccgtttatggcgctgaccgccacagccgacgacaccacgcgccaggatatcgtgcgcctgctggggctgaacgatccgctgattcaaatcagcagttttgaccgtccgaatattcgctacatgctgatggagaagttcaaaccgctcgatcagttgatgcgctacgtgcaggaacagcgcggtaagagtggcattatctactgcaacagccgcgcgaaagtagaagacaccgctgcgcgcctgcaaagcaagggaattagcgcggcggcctatcatgccgggctggaaaataatgttcgcgccgatgtgcaggaaaaattccagcgcgatgacctgcaaattgtggtggcgacggtggcgttcggcatgggcatcaataaaccaaacgttcgcttcgtggtccactttgatattccgcgcaatatcgaatcctattatcaggaaaccggacgcgccgggcgtgatggcctgcccgcggaagcgatgctgttttacgatccggctgatatggcgtggctgcgccgttgtctggaagagaagccgcaggggcagttgcaggatatcgagcgccacaaactcaatgcgatgggcgcgtttgccgaagcgcaaacttgccgtcgtctggtattgctgaactattttggcgaagggcgtcaggagccgtgcgggaactgcgatatctgcctcgatccgccgaaacagtacgacggtagtaccgatgctcagattgccctttccaccattggtcgtgtgaatcagcggtttgggatgggttatgtggtggaagtgattcgtggtgctaataaccagcgtatccgcgactatggtcatgacaaactgaaagtctatggcatgggccgtgataaaagccatgaacattgggtgagcgtgatccgccagctgattcacctcggcctggtgacgcaaaatattgcccagcattctgccctacaactgacagaggccgcgcgcccggtgctgcgcggcgaatcctctttgcaacttgccgtgccgcgtatcgtggcgctcaaaccgaaagcgatgcagaaaagcttcggcggcaactatgatcgcaaactgttcgccaaattacgcaaactgcgtaaaagcatagccgatgaaagtaatgtcccgccgtacgtggtgtttaacgacgcaaccttgattgagatggctgaacagatgccgatcaccgccagcgaaatgctcagcgttaacggcgttgggatgcgcaagctggaacgctttggcaaaccgtttatggcgctgattcgtgcgcatgttgatggcgatgacgaagagtaatcagcagcataaaaaagtgccagtatgaagactccgtaaacgtttcccccgcgagtcaaatgtatgttgatgttatttctcaccgtcgccatggtgcacattgtggcgcttatgagccccggtcccgatttcttttttgtctctcagaccgctgtcagtcgttcccgtaaagaagcgatgatgggcgtgctgggcattacctgcggcgtaatggtttgggctgggattgcgctgcttggcctgcatttgattatcgaaaaaatggcctggctgcatacgctgattatggtgggcggtggcctgtatctctgctggatgggttaccagatgctacgtggtgcactgaaaaaagaggcggtttctgcacctgcgccacaggtcgagctggcgaaaagtgggcgcagtttcctgaaaggtttactgaccaatctcgctaatccgaaagcgattatctactttggcagcgtgttcagtttgtttgtcggtgataacgttggcactaccgcgcgctggggcatttttgcgctgatcattgtcgaaacgctggcgtggtttaccgtcgttgccagcctgtttgccctgccgcaaatgcgccgtggttatcaacgtctggcgaagtggattgatggttttgccggggcgttatttgccggatttggcattcatttgattattagccggtgatgccagacgcgtcttcagagtaagtcggataaggcgtttacgccgcatccgacattatttttcacgcatgcctcgcgcttgctaacagcgctcccaccagcataaacaagctgccgaaaatcttattcagcgccttcatctgctttggtcctttaatccatagagcaatccgttgagcaagggtggcgtaaccgatcatcacaataatatcgaccacaatagtggtgacgccgagcacgatatactgcatcagttgcggctgttgcggcatgatgaattgcggaaatagcgccgccagaaacacaatacttttgggattggtgagattcacaaaaactgcgcgctggaacaaatgtcgacggctttgagtagaggccaggcttttaaggtcaattgcaccagcggcgcgccactgctggattcccagccaaatcaagtaagccgcgcctgcccacttcaacacttcaaacgcaatcacactgcgggaaaatagcgtccccaaccccacgccaaccagcacaatatgaatcgccagtccggtctgaagcccagcaatagacgccaccgcgccgcgataaccgtggttgaggctggtggtcatagtgttgattgcaccagagcctgggctcaggcttaaaatgatgcttgtcagcaggtaggcaaaccaccattctaaggtcatgatgaactcccggtgtgtctatttttgtgccacaatacgctactgtcgcagcgttgtgtcaggcacgctaaaaaaaacgattttacgtggtttaagaggcagattacccgatgtttcagcagcaaaaagactgggaaacaagagaaaacgcgtttgctgcttttaccatgggaccgctgactgatttctggcgtcagcgtgatgaagcagagtttactggtgtggatgacattccggtgcgctttgtccgttttcgcgcacagcaccatgaccgggtggtagtcatctgcccggggcgtattgagagctacgtaaaatatgcggaactggcctatgacctgttccatttggggtttgatgtcttaatcatcgaccatcgcgggcagggacgttccggtcgcctgttagccgatccgcatctcgggcatgttaatcgctttaatgattatgttgatgatctggcggcattctggcagcaggaggttcagcccggtccgtggcgtaaacgctatatactggcacatagcatgggcggtgcgatctccacattatttctgcaacgccatccaggtgtatgtgacgccattgcgctaactgcgccaatgtttgggatcgtgattcgtatgccgagttttatggcacggcagatcctcaactgggccgaagcgcatccacgtttccgtgatggctatgcaataggcaccgggcgctggcgcgcgttgccgtttgctatcaacgtactgacccacagcagacagcgatatcgacgtaacttacgcttctatgctgatgacccaacgattcgcgtcggtgggccgacctaccattgggtacgcgaaagtattctggctggcgaacaggtgttagccggtgcgggtgatgacgccacgccaacgcttctcttgcaggctgaagaggaacgcgtggtggataaccgcatgcatgaccgtttttgtgaactccgcaccgccgcgggccatcctgtcgaaggaggacggccgttggtaattaaaggtgcttaccatgagatcctttttgaaaaggacgcaatgcgcagtgtcgcgctccacgccatcgttgattttttcaacaggcataacagtcccagcggaaaccgctctacagaggtttaaatttcttatgtaccaggttgttgcgtctgatttagatggcacgttactttctcccgaccatacgttatccccttacgccaaagaaactctgaagctgctcaccgcgcgcggcatcaactttgtgtttgcgaccggtcgtcaccacgttgatgtggggcaaattcgcgataatctggagattaagtcttacatgattacctccaatggtgcgcgcgttcacgatctggatggtaatctgatttttgctcataacctggatcgcgacattgccagcgatctgtttggcgtagtcaacgacaatccggacatcattactaacgtttatcgcgacgacgaatggtttatgaatcgccatcgcccggaagagatgcgcttttttaaagaagcggtgttccaatatgcgctgtatgagcctggattactggagccggaaggcgtcagcaaagtgttcttcacctgcgattcccatgaacaactgctgccgctggagcaggcgattaacgctcgttggggcgatcgcgtcaacgtcagtttctctaccttaacctgtctggaagtgatggcgggcggcgttagtaaaggccatgcgctggaagcggtggcgaagaaactgggctacagcctgaaggattgtattgcgtttggtgacgggatgaacgacgccgaaatgctgagcatggcggggaaaggctgcattatgggcagtgcgcaccagcgtctgaaagaccttcatcccgagctggaagtgattggtactaatgccgacgacgcggtgccgcattatctgcgtaaactctatttaagctaatcgttctttatttggtcagttgtcaacctgatacttcgctacaatggatacccgttaatcaaagagttttccattgtggcgctacttatcatcaccacgattctgtgggccttctcctttagcttttatggcgagtaccttgcggggcacgtcgatagctattttgcggtgctggtgcgcgttggcctggcggcactcgtttttctgccgtttctgcgtacccgtggcaatagcctgaaaacggtcggcctgtatatgctggtgggcgcgatgcagcttggcgtgatgtatatgctgagtttccgcgcttatctctacctgacggtttccgagctgctgctgttcaccgtgctgacgccgctctacatcacgctgatttatgacatcatgagtaagcgccgtctgcgctggggctatgcctttagcgccttgctggcggtgattggtgccgggattattcgctatgatcaggtcaccgaccatttctggactggcttgctgctggtgcaactctccaatatcacttttgccattggcatggtgggttacaaacgcctgatggaaactcgcccgatgccacagcataacgcctttgcgtggttctatcttggcgcgtttctggtggcagtgattgcatggttcttgctgggaaatgcgcagaaaatgccgcaaaccacgctgcaatggggcattctggtgtttcttggcgtggtggcttccgggattggctactttatgtggaactacggcgcgacgcaggtggacgccggaacgctgggcattatgaataatatgcacgttccggcagggctgctggtaaacctggctatctggcaccaacagccgcactggccaacgtttattacaggcgcgctggtgatcctggccagtctgtgggtgcatcgtaagtgggtcgctccgcgctctagtcaaacggcagatgatcgcaggcgtgattgcgcgctgagcgaataattacaggcgcgctggacttcctggcctcactgtgggtgcatcgtaagtgggtcgctccgcgctcttcacaaacggcagatgatcgcaggcgtgattgcgcgcactgcgaataaacgcttccgtaactggctgacgctgctcgccatcgcgcacggcggcgtacagtcggctccacaagccttcgcccagggttttggtcaccaccagaccctggcgctcaaaactctctactacccaatgcggtagcgcggcaatacccatccgcgcggcaaccatctgaatcaacaataaggtgttatcgacgcttttcagactcgggctgacgcctgccggctgaagaaaatgccgccagacatccagtcgactacgctgcaccggataaattaatagcgtctcgctggcgagatcttccggtgtaattcgcgttttcgccgccagtggatggtcaggtgctaacaccagacgcacttcatagtcgaacatcgggctataatgcaggccactgcgcggcagaatatcggacgtcattaccagatccagctctccctgttgcaaggcgggctgcgggtcaaatgtcacgccgcttttaaaatccatctctacctgcggccagttcttatggaaattttctaacgcgggtgtcagccactgaatacagctatggcactcaatggcaatgcgcagacgcgtctgctgcggttcattgcaggcttgcagggcctggctaatttgcggcagtacctggtttgccagttgcaacaggatttctccctgcggtgtaaagcgtagcggctggctcttacgcacaaatagccggaagccaaggcgttgttccagatcgctaaactggtgagacagggcggattgcgtctgatgcaacgtcgccgcagcggctgcgaggctgccgcagttccgcaacgcttgtagcgttttcaggtgttttacttcgatcatgaaagtccttcacttcggcatgaataatttgcgcttgaggaatatacagtaaccgccaattatggatgtgtaaacatctggacggctaaaatccttcgtcttttaaatttatggtgcgttggctgcgtttctccaccccggtcacttacttcagtaagctcccggggatgaataaacttgccgccttccctaaattcaaaatccataggatttacatataattagaggaagaaaaaatgacaatattgaatcacaccctcggtttccctcgcgttggcctgcgtcgcgagctgaaaaaagcgcaagaaagttattgggcggggaactccacgcgtgaagaactgctggcggtagggcgtgaattgcgtgctcgtcactgggatcaacaaaagcaagcgggtatcgacctgctgccggtgggcgattttgcctggtacgatcatgtactgaccaccagtctgctgctgggtaacgttccggcgcgtcatcagaacaaagatggtagcgtagatatcgacaccctgttccgtattggtcgtggacgtgcgccgactggcgaacctgcggcggcagcggaaatgaccaaatggtttaacaccaactatcactacatggtgccggagttcgttaaaggccaacagttcaaactgacctggacgcagctgctggacgaagtggacgaggcgctggcgctgggccacaaggtgaaacctgtgctgctggggccggttacctggctgtggctggggaaagtgaaaggtgaacaatttgaccgcctgagcctgctgaacgacattctgccggtttatcagcaagtgctggcagaactggcgaaacgcggcatcgagtgggtacagattgatgaacccgcgctggtactggaactaccacaggcgtggctggacgcatacaaacccgcttacgacgcgctccagggacaggtgaaactgctgctgaccacctattttgaaggcgtaacgccaaatctcgacacgattactgcgctgcctgttcagggtctgcatgttgacctcgtacatggtaaagatgacgttgctgaactgcacaagcgcctgccttctgactggttgctgtctgcgggtctgatcaatggtcgtaacgtctggcgcgccgatcttaccgagaaatatgcgcaaattaaggacattgtcggcaaacgtgatttgtgggtggcatcttcctgcagcttgctgcacagccccatcgacctgagcgtggaaacgcgtcttgatgcagaagtgaaaagctggtttgccttcgccctacaaaaatgccatgaactggcactgctgcgcgatgcgctgaacagtggtgacacggcagctctggcagagtggagcgccccgattcaggcacgtcgtcactctacccgcgtacataatccggcggtagaaaagcgtctggcggcgatcaccgcccaggacagccagcgtgcgaatgtctatgaagtgcgtgctgaagcccagcgtgcgcgttttaaactgccagcgtggccgaccaccacgattggttccttcccgcaaaccacggaaattcgtaccctgcgtctggatttcaaaaagggcaatctcgacgccaacaactaccgcacgggcattgcggaacatatcaagcaggccattgttgagcaggaacgtttgggactggatgtgctggtacatggcgaggccgagcgtaatgacatggtggaatactttggcgagcacctcgacggatttgtctttacgcaaaacggttgggtacagagctacggttcccgctgcgtgaagccaccgattgtcattggtgacattagccgcccggcaccgattaccgtggagtgggcgaagtatgcgcaaagcctgaccgacaaaccggtgaaagggatgctgacggggccggtgaccatactctgctggagcttcccgcgtgaagatgtcagccgtgaaaccatcgccaaacagattgcgctggcgctgcgtgatgaagtggccgatctggaagccgctggaattggcatcatccagattgacgaaccggcgctgcgcgaaggtttaccgctgcgtcgtagcgactgggatgcgtatctccagtggggcgtagaggccttccgtatcaacgccgccgtggcgaaagatgacacacaaatccacactcacatgtgttattgcgagttcaacgacatcatggatagcattgcggcgctggacgcagacgtcatcaccatcgaaaccagccgttccgacatggagttgctggagagctttgaagagtttgattatccaaatgaaatcggtcctggcgtctatgacattcacagcccaaacgtaccgagcgtggaatggattgaagccttgctgaagaaagcggcaaaacgcattccggcagagcgcctgtgggtcaacccggactgtggcctgaaaacgcgcggctggccagaaacccgcgcggcactggcgaacatggtgcaggcggcgcagaacttgcgtcgggggtaaaatccaaaccgggtggtaataccacccggtcttttctcattacaggctcttcttcccaccatactgcttaaaccattccagcatacgctgccagccatcttctgcagatgcggcatgatagctcgggcgataatcagcgttgaatgcatgcccggcgtccgggtacacgataatctctgctttcgcattagcagcccgcagcgcctggcgcatggtttcaacgctctcctgcggaatgctgttatcctgaccaccatataagccgagaatcggcgcgttaagatcggttgcgatatcaacaggttgtttcggactattcaggctcttgtcgcccgtcagtttgccgtaccacgccactgcggcttttagctgtggattatgcgcggcatacagccaggtgatacgtccaccccagcagaatccggtgatcattaaacgatgaacatcgccgccgttgcgggaagcccaactggcgacatgatcgagatcggccagcacctggctgtcaggcacttttgctaccagaccgctaagcaacgtggggatatcggcaaaatcattcggatcgccttcgcggaagtaaagttcaggtgcgatagccagatacccctccagcgccagacggcgacaaatgtcgcggatatgttcatgcacgccaaaaatttcctgcactacaatgaccactggcagtgggccatcgctttgctttggtctggcatggtaagcaggcatgttatccccttgactagggatagaggtgaagcccgccacaatcgcgtcgtccggggtctgaacgatggtgctagcgagagggcttgcagcaggtgcaaatccagattgttgtgttgttgccatggtattctccgtacccttataaaaatgttgcgcaatgttaactatagtcagcatgcaacaaatcacattgcctgaatcggctcatcttttatgcagtcctgcagaatgaagggtgatttatgtgatttgcatcacttttggtgggtaaatttatgcaacgcatttgcgtcatggtgatgagtatcacgaaaaaatgttaaacccttcggtaaagtgtctttttgcttcttctgactaaaccgattcacagaggagttgtatatgtccaagtctgatgtttttcatctcggcctcactaaaaacgatttacaaggggctacgcttgccatcgtccctggcgacccggatcgtgtggaaaagatcgccgcgctgatggataagccggttaagctggcatctcaccgcgaattcactacctggcgtgcagagctggatggtaaacctgttatcgtctgctctaccggtatcggcggcccgtctacctctattgctgttgaagagctggcacagctgggcattcgcaccttcctgcgtatcggtacaacgggcgctattcagccgcatattaatgtgggtgatgtcctggttaccacggcgtctgtccgtctggatggcgcgagcctgcacttcgcaccgctggaattcccggctgtcgctgatttcgaatgtacgactgcgctggttgaagctgcgaaatccattggcgcgacaactcacgttggcgtgacagcttcttctgataccttctacccaggtcaggaacgttacgatacttactctggtcgcgtagttcgtcactttaaaggttctatggaagagtggcaggcgatgggcgtaatgaactatgaaatggaatctgcaaccctgctgaccatgtgtgcaagtcagggcctgcgtgccggtatggtagcgggtgttatcgttaaccgcacccagcaagagatcccgaatgctgagacgatgaaacaaaccgaaagccatgcggtgaaaatcgtggtggaagcggcgcgtcgtctgctgtaattctcttctcctgtctgaaggccgacgcgttcggccttttgtatttttgcgtagcgcctcgcaggaaatgcctttccaactggacgtttgtacagcacaattctattttgtgcgggtaagttgttgcgtcaggaggcgttgtggatttcagtatcatggtttacgcagttattgcgttggtgggtgtggcaattggctggctgtttgccagttatcaacatgcgcagcaaaaagccgagcaattagctgaacgtgaagagatggtcgcggagttaagcgcggcaaaacaacaaattacccaaagcgagcactggcgtgcagagtgcgagttactcaataacgaagtgcgcagcctgcaaagtattaacacctctctggaggccgatctgcgtgaagtaaccacgcggatggaagccgcacagcaacatgctgacgataaaattcgccagatgattaacagcgagcagcgcctcagtgagcagtttgaaaacctcgccaaccgtatttttgagcacagcaatcgccgggttgatgagcaaaaccgtcagagtctgaacagcctgttgagcccgctacgtgaacaactggacggtttccgccgtcaggttcaggacagcttcggtaaagaagcacaagaacgccataccctgacccacgaaattcgcaatctccagcaactcaacgcgcaaatggcccaggaagcgatcaacctgacgcgcgcgctgaaaggcgacaataaaacccagggcaactggggcgaggtagtattgacgcgggtgttggaggcttccggtctgcgtgaagggtatgaatatgaaacccaggtcagcatcgaaaatgacgcccgcagccggatgcagccggatgtcatcgtgcgcctgccgcagggaaaagatgtggtgatcgacgccaaaatgacgctggtcgcctatgaacgctattttaacgccgaagacgactacacccgcgaaagcgcgctacaggaacatatcgcgagcgtgcgtaaccatatccgtttgctgggacgcaaagattatcaacagctgccggggctgcgaactctggattacgtgctgatgtttattcccgttgaacccgcttttttactggcgcttgaccgccagccggagctgatcaccgaagcgttgaaaaacaacatcatgctggttagcccgactacgctgctggtggcgctgcgcactatcgccaacctgtggcgttatgagcatcaaagccgcaacgcccagcaaatcgccgatcgtgccagcaagctgtacgacaagatgcgtttgttcatcgatgacatgtccgcgattggtcaaagtctcgacaaagcgcaggataattatcggcaggcaatgaaaaaactctctagtgggcgcggaaatgtgctggcgcaggcagaagcgtttcgcggtttaggagtagaaattaaacgcgagattaatccggatttggctgaacaggcggtgagccaggatgaagagtatcgacttcggagcgttccggagcagccgaatgatgaagcttatcaacgcgatgatgaatataatcagcagagccgctaacccattgggagtagttaagccgggtagaaatctagggcatcgacgcccaatctgttacacttctggaacaattttttgatgagcaggcattgagatggtggataagagtcaagaaacgacgcactttggttttcagaccgtcgcgaaggaacaaaaagcggatatggtcgcccacgttttccattccgtggcaagtaaatacgatgtcatgaatgatttgatgagttttggtattcatcgtttgtggaagcgattcacgattgattgcagcggcgtacgccgtgggcagaccgtgctggatctggctggtggcaccggcgacctgacagcgaaattctcccgcctggtcggagaaactggcaaagtggtccttgctgatatcaatgaatccatgctcaaaatgggccgcgagaagctgcgtaatatcggtgtgattggcaacgttgagtatgttcaggcgaacgctgaggcgctgccgttcccggataacacctttgattgcatcaccattagctttggtctgcgtaacgtcaccgacaaagataaagcactgcgtagtatgtatcgcgtgctgaaacccggcggccgcctgctggtgcttgagttcagcaagccaattatcgagccgctgagcaaagcctatgatgcatactccttccatgtgctgccgcgtattggcagtctggtcgcgaacgacgccgacagctaccgttatctggcagaatccatccgtatgcatcccgatcaggataccctgaaagccatgatgcaggatgccggattcgaaagtgtcgactactacaatctgacggcaggggttgtggcgctgcatcgtggttataagttctgacaggagaccggaaatgccttttaaacctttagtgacggcaggaattgaaagtctgctcaacaccttcctgtatcgcagtcccgcgctgaaaacggcccgcagccgtctgctgggtaaagtattgcgcgtggaggtaaaaggctttagcacgagtttgattctggtgttcagcgaacgccaggttgatgtactgggcgaatgggcaggcgatgctgactgcaccgttatcgcctacgccagtgtgttgccgaaacttcgcgatcgccagcagcttaccgcactgattcgcagtggtgagctggaagtgcagggcgatattcaggtggtgcaaaacttcgttgcgctggcagatctggcagagttcgaccctgcggaactgctggccccttataccggtgatatcgccgctgaaggaatcagcaaagccatgcgcggaggcgcaaagttcctgcatcacggcattaagcgccagcaacgttatgtggcggaagccattactgaagagtggcgtatggcacccggtccgcttgaagtggcctggtttgcggaagagacggctgccgtcgagcgtgctgttgatgccctgaccaaacggctggaaaaactggaggctaaatgacgccaggtgaagtacggcgcctatatttcatcattcgcacttttttaagctacggacttgatgaactgatccccaaaatgcgtatcaccctgccgctacggctatggcgatacagtttattctggatgccaaatcggcataaagacaaacttttaggtgagcgactacgactggccctgcaagaactggggccggtttggatcaagttcgggcaaatgttaagtacccgccgcgatctttttccaccgcatattgccgatcagctggcgttattgcaggacaaagttgctccgtttgatggcaagctggcgaagcagcagattgaagctgcaatgggcggcttgccggtagaagcgtggtttgacgattttgaaatcaagccgctggcttctgcttctatcgcccaggttcataccgcgcgattgaaaagcaatggtaaagaggtggtgattaaagtcatccgcccggatattttgccggttattaaagcggatctgaaacttatctaccgtctggctcgctgggtgccgcgtttgctgccggatggtcgccgtctgcgcccaaccgaagtggtgcgcgagtacgaaaagacattgattgatgaactgaatttgctgcgggaatctgccaacgccattcagcttcggcgcaattttgaagacagcccgatgctctacatcccggaagtttaccctgactattgtagtgaagggatgatggtgatggagcgcatttacggcattccggtgtctgatgttgcggcgctggagaaaaacggcactaacatgaaattgctggcggaacgcggcgtgcaggtgttcttcactcaggtctttcgcgacagctttttccatgccgatatgcaccctggcaacatcttcgtaagctatgaacacccggaaaacccgaaatatatcggcattgattgcgggattgttggcagcctaaacaaagaagataaacgctatctggcagaaaactttatcgccttctttaatcgcgactatcgcaaagtggcagagctacacgtcgattctggctgggtgccaccagataccaacgttgaagagttcgaatttgccattcgtacggtctgtgaacctatctttgagaaaccgctggccgaaattagctttggacatgtactgttaaatctgtttaatacggcgcgtcgcttcaatatggaagtgcagccgcaactggtgttactccagaaaaccctgctctacgtcgaaggggtaggacgccagctttatccgcaactcgatttatggaaaacggcgaagcctttcctggagagctggattaaagatcaggtcggtattcctgcgctggtgagagcatttaaagaaaaagcgccgttctgggtcgaaaaaatgccagaactgcctgaattggtttacgacagtttgcgccagggcaagtatttacagcacagtgttgataagattgcccgcgagcttcagagtaatcatgtacgtcagggacaaagccgttattttctcggaattggcgctacgttagtattaagtggcacattcttgttggtcagccgacctgaatgggggctgatgcccggctggttaatggcaggtggtctgatcgcctggtttgtcggttggcgcaaaacacgctgattttttcatcgctcaaggcgggccgtgtaacgtataatgcggctttgtttaatcatcatctaccacagaggaacatgtatgggtggtatcagtatttggcagttattgattattgccgtcatcgttgtactgctttttggcaccaaaaagctcggctccatcggttccgatcttggtgcgagcatcaaaggctttaaaaaagcaatgagcgatgatgaaccaaagcaggataaaaccagtcaggatgctgattttactgcgaaaactatcgccgataagcaggcggatacgaatcaggaacaggctaaaacagaagacgcgaagcgccacgataaagagcaggtgtaatccgtgtttgatatcggttttagcgaactgctattggtgttcatcatcggcctcgtcgttctggggccgcaacgactgcctgtggcggtaaaaacggtagcgggctggattcgcgcgttgcgtagtctggcgacaacggtgcagaacgaactgacccaggagttaaaactccaggagtttcaggacagtctgaaaaaggttgaaaaggcgagcctcactaacctgacgcccgaactgaaagcgagcatggatgaactacgccaggccgcggagagcatgaagcgttcctacgttgcaaacgatcctgaaaaggcgagcgatgaagcgcacaccatccataacccggtggtgaaagataatgaagctgcgcatgagggcgtaacgcctgccgctgcacaaacgcaggccagtagcccggaacagaagccagaaaccacgccagagccggtggtaaaacctgctgcggacgctgaaccgaaaaccgctgcaccttcccctagcagcagtgataaaccgtaaacatgtctgtagaagatactcaaccgcttatcacgcatctgattgagctgcgtaagcgtctgctgaactgcattatcgcggtgatcgtgatattcctgtgtctggtctatttcgccaatgacatctatcacctggtatccgcgccattgatcaagcagttgccgcaaggtagtacgatgatcgccaccgacgtggccagcccgttctttacgccgatcaagctgacctttatggtgagcctgattctgagtgcgccggtgattctctatcaggtgtgggcatttatcgccccagcgctgtataagcatgaacgtcgcctggtggtgccgctgctggtttccagctctctgctgttttatatcggcatggcattcgcctactttgtggtctttccgctggcatttggcttccttgccaataccgcgccggaaggggtgcaggtatccaccgacatcgccagctatttaagcttcgttatggcgctgtttatggcgtttggtgtctcctttgaagtgccggtagcaattgtgctgctgtgctggatggggattaccagcccagaagacttacgcaaaaaacgcccgtatgtgctggttggtgcattcgttgtcgggatgttgctgacgccgccggatgtcttcagccaaacgctgttggcgatcccgatgtactgtctgtttgaaatcggtgtcttcttcagtcgcttttacgttggtaaagggcgaaatcgggaagaggaaaacgacgctgaagcagaaagcgaaaaaactgaagaataaattcaaccgcccgtcagggcggttgtcatatggagtacaggatgtttgatatcggcgttaatttgaccagtagccaatttgcgaaagaccgtgatgatgttgtagcgtgcgcttttgacgcgggagttaatgggctactcatcaccggcactaacctgcgtgaaagccagcaggcgcaaaagctggcgcgtcagtatagctcctgttggagtacggcgggcgtacatcctcacgacagcagccagtggcaagctgcgactgaagaagcgattattgagctggccgcgcagccagaagtggtggcgactggtgaatgtggtctcgactttaaccgcaactttagcacgccggaagagcaggaacgcgcttttgttgcccagctacgcattgccgcagatttaaacatgccggtatttatgcactgtcgcgatgcccacgagcggtttatgacattgctggagccgtggctggataaactgcctggtgcggttcttcattgctttaccggcacacgcgaagagatgcaggcgtgcgtggcgcatggaatttatatcggcattaccggttgggtttgcgatgaacgacgcggactggagctgcgggaacttttgccgttgattccggcggaaaaattactgatcgaaactgatgcgccgtatctgctccctcgcgatctcacgccaaagccaagttcccggcgcaacgagccagcccatctgccccatattttgcaacgtattgcgcactggcgtggagaagatgccgcatggctggctgccaccacggatgctaatgtcaaaacactgtttgggattgcgttttaaagtttgcggaactcggtattcttcacactgtgcttaatctctttattaataagattaagcaatagcatggagcgagcctcaccatcgggttcggtgaaaatggcctgaaagccttcgaacgcgccttcggtaataatcaccttatcacccggataaggggttgccggatcgacaatgtctttcggtttatatacgcttagctgatgaataaccgcgcttgggactatcgctgggctcgcgccaaagcgcacgaagtggctgacaccgcgggtcgcgttgatagtcgtggtatgaatcacttctgggtcaaattccacaaacaggtagttggggaacaatggctcactgactgcagtacgttttccacgcacgattttttccagggtgatcatcggtgccaggcaattcacagcctgtctttcgaggtgttcctgggcacgttgaagttgcccgcgcttgcagtacagtaaataccaggattgcataatgactcttatccgtttaatcggggcgcaaggatagcaaaagctttacgctaagttaattatattccccggtttgcgttataccgtcagagttcacgctaatttaacaaatttacagcatcgcaaagatgaacgccgtataatgggcgcagattaagaggctacaatggacgccatgaaatataacgatttacgcgacttcttgacgctgcttgaacagcagggtgagctaaaacgtatcacgctcccggtggatccgcatctggaaatcactgaaattgctgaccgcactttgcgtgccggtgggcctgcgctgttgttcgaaaaccctaaaggctacagtatgccggtgctgtgcaacctgttcggtacgccaaagcgcgtggcgatgggcatggggcaggaagatgttagcgcgctgcgtgaagttggtaaattattggcgtttctgaaagagccggagccgccaaaaggtttccgcgacctgtttgataaactgccgcagtttaagcaagtattgaacatgccgacaaagcggctgcgtggtgcgccctgccaacaaaaaatcgtctctggcgatgacgtcgatctcaatcgcattcccattatgacctgctggccggaagatgccgcgccgctgattacctgggggctgacagtgacgcgcggcccacataaagagcggcagaatctgggcatttatcgccagcagctgattggtaaaaacaaactgattatgcgctggctgagccatcgcggcggcgcgctggattatcaggagtggtgtgcggcgcatccgggcgaacgtttcccggtttctgtggcgctgggtgccgatcccgccacgattctcggtgcagtcactcccgttccggatacgcttagtgagtatgcgtttgccggattgctacgtggcaccaagaccgaagtggtgaagtgtatctccaatgatcttgaagtgcccgccagtgcggagattgtgctggaagggtatatcgaacaaggcgaaactgcgccggaagggccgtatggcgaccacaccggttactataatgaagtcgatagtttcccggtatttaccgtgacgcatattacccagcgtgaagatgcgatttaccattccacctataccgggcgtccgccagatgagcccgcggtgctgggtgtcgcactgaacgaagtgtttgtgccgattctgcaaaaacagttcccggaaattgtcgatttttacctgccgccggaaggctgctcttatcgcctggcggtagtgacaatcaaaaaacagtacgccggacacgcgaagcgcgtcatgatgggcgtctggagcttcttacgccagtttatgtacactaaatttgtgatcgtttgcgatgatgacgttaacgcacgcgactggaacgatgtgatttgggcgattaccacccgtatggacccggcgcgggatactgttctggtagaaaatacgcctattgattatctggattttgccagccctgtctccgggctgggtagtaaaatggggctggatgccacgaataaatggccgggggaaacccagcgtgaatggggacgtcccatcaaaaaagatccagatgttgtcgcgcatattgacgccatctgggatgaactggctatttttaacaacggtaaaagcgcctgatgcgcgtttgttttgccctatttatcgatccgacagagaaagcgcatgacaaccttaagctgtaaagtgaccagcgtagaagctatcacggataccgtatatcgtgtccgcatcgtgccagacgcggccttttcttttcgtgctggtcagtatttgatggtagtgatggatgagcgcgacaaacgtccgttcagtatggctagcacgccggatgaaaaagggtttatcgagctgcatattggcgcttctgaaatcaacctttacgcgaaagcagtcatggaccgcatcctcaaagatcatcaaatcgtggtcgacattccccacggagaagcgtggctgcgcgatgatgaagagcgtccgatgattttgattgcgggcggcaccgggttctcttatgcccgcagcattttgctgacagcgttggcgcgtaacccaaaccgtgatatcaccatttactggggcgggcgtgaagagcagcatctgtatgatctctgcgagcttgaggcgcttagcttgaagcatcctggtctgcaagtggtgccggtggttgaacaaccggaagcgggctggcgtgggcgtactggcaccgtgttaacggcggtattgcaggatcacggtacgctggcagagcatgatatctatattgccggacgttttgagatggcgaaaattgcccgcgatctgttttgcagtgagcgtaatgcgcgggaagatcgcctgtttggcgatgcgtttgcatttatctgagatataaaaaaacccgcccctgacaggcgggaagaacggcaactaaactgttattcagtggcatttagatctatgacgtatctggcaaaccatgcccgatgcgacgctgtcgcgtcttatcgtgcctacaaatagtccgaaccgtaggccggataaggcgtttacgccgcatccggcaattggtgcatgatgcctgatgcgacgctgtcgcgtcttatcgtgcctacaaatagtccgaaccgtaggccggataaggcgtttacgccgcatccggcaattggtgcatgatgcctgatgcgacgctggcgcgtcttatcaggcctacattggtgccggatcggtagaccggataaggcgttcacgccgcatccggcaagtggttaaacccgctcaaacaccgtcgcaataccctgacccagaccgatacacatcgtcgccagaccaaactgaacgtctttgcgttccatcagattcagcagcgtggtgctgatacgcgcaccggaacaacccagcggatgacccagcgcgatcgcgccaccgttgaggttgatcttctcgtcaatctgctcaattagtcccagatctttaatacatggcaggatctgcgcggcaaaggcttcgttcatttcaaacacgccgatatcgctggcagaaagccccgcttttttcagcgccagtttgctggccggaaccgggccgtaacccataatgcttgggtcacaaccaacgaccgccatgctacgcacacgagcgcgcggcttaagacctaattcatgggcgcggctttcactcatcaccagcatggcagctgcgccatcggaaagtgcagaagatgtgcccgccgttaccataccgtttactggatcaaacgccggacgcagcgtggcgagggcttccacggtggtttccgggcgaatcacttcgtcgtaattaaactgcttcaggacgccgtcggcatcgtgaccaccggtcgggatgatttcatttttaaatgcggcgctctgcgtggcggcccaggcgcgggcgtgactccgcgcggcaaaggcatcctgcatttcacggctgataccgtgcatacgcgccagcatttctgccgttaagcccatcatgcccgccgctttggcgacattgcggctcaggccggggtgaaaatcgacgccgtgactcatcggcacatggcccatatgctccacgccgccaaccagacatgcctgcgcatcgccagtcatgatcattcgtgctgcgtcatgcagtgcctgcatggaactaccacacaagcgattaacggtaaccgccgggacagagtgtggtacttctgccagcagcgccgcgttacgggcgatattaaaaccctgctccagcgtctgctgcacacaaccccagtaaatatcgtcgagggccgccgcttccagcgccgggttacgcgccagcaggctacgcattaaatgagcggagagatcttctgcacgcacgttacgaaaagcaccgcccttgctacggcccatcggggtgcgaattgcatcgacaatgacaacctgttccattgtgactccttaagccgttttcaggtcgccaaccggacgggctggctcaaccggaggatagtacggttcgttatgacgcgctttattacgcagaccttccggcacttcatacagcgggccgaggtgctgatattgctgtgccatatcgaggtattttgcgctaccgagggtgtccagccagcggaacgcgccgccgtggaacggagggaagcccaggccgtagaccagcgccatatccgcttccgccggagtggcgataatgccttcctccagacagcgcaccacttcgttgaccatcgggatcatcatgcgggcgataatctcttcttcgctgaagtcgcgcttcggctggctcacttctgccagcaggtcttcaacggcggcgtcttcttctttcttcggcttacctttgctgtcttctttataacgccagaaaccgaggccgttcttctgaccaaagcggttggcatcaaacagcgcgtcgatggcatcgcggtaatctttctgcatccgctgcgggaagcctgctgccatgacagcctgagcgtgatgcgcggtatcaatgcccacaacgtccagcagatatgccgggcccatcggccagccaaactgtttttccatcactttgtcgatcttgcggaaatccgcgccgtcgcgcagcagctggctgaaaccggcgaaatacgggaacagcacgcggttaacaaagaagccggggcagtcgttaaccacaatcggcgtcttgcccatcttgctcgcccaggcgacaactttcgcgatggtttcgtcggagcttttctcgccgcgaataatttctaccaacggcattcggtggaccgggttaaagaagtgcatcccgcagaagttttccgggcgttccagcgcgttggccagttcgctgataggaatggtactagtgttagacgccagcacggtatcctggcgtactttttgttcggtttctgccagtacggcttttttcactttcgggttttcaacaaccgcttctaccacaatatccacgcggtcaaatccggcgtagtcgagcgttgggtggattgtggagatcacgccagccagtttcagaccatcgatcttgccgcgctcaagctgcttgttcagcagtttcgcggcttcggtcatgccgagggttaagctcttgtcgttgatatctttcatgacaaccggcacgcctttccacgcagactggtaagcgatgccgccgcccataatgcctgcacccagcaccgcggcctgtttcggggtttcaacgtctttggtgagtttcttcgctttgccttttacatattgatcgttaaggaaaatgccgaccagtgcgcgggcttcgttggtatgcgccagcgggacaaaacttttgttttccaggtttaaggcttcttcacgaccaaaacgggccgcagcttcaatggtttttactgcggtgatgggggccggataatgtttccccgctgtttgtgcgaccatccctttagcgatggtgaagctcatggtggcttcaatcttgctcagttttagtggttccagcttcggctgacgttttgctttccagtcgaggtcgccgttaatggcctggcgtaaaaccgcctttgcgccttcaaccagtttttctgctttgactacgccatccaccagaccgattttcagcgcctgatccgcgccgacatctttaccggcggcaatgatttccagcgcactgtcagcgcccagcatacgtggcatacgtacagaaccgccaaagccaggcatgatgcccagtttggtttccggcagaccgatgcgcagatccggcgtcgccagacgataatcggtcgccagcacgcattcgcagccaccgcccagcgcatagccattgacggcagcaatggtcggcaccggcagatcttccaggcgattaaacacgctattggcaaagtgcagccactgacttaactgttcttcaggaacgaggaacagggacaaaaattcggtgatatcagcaccgacgataaaggctgctttgttgctacgcagcagcagcccttttagatcactttgctgttccagcacgccgatggcctcgccgaggctggcgacggtcgcagtgtcgagtttattaacactacctggggcatcaaataccagttcggcaatgccatcttccagccagtcaaggtacagggtgtcgcctttgtaaagcatgtcagtctcctgaatccgcaaggtgatctggtcgtaccagatgagtcgaagtgtgtattttgtgttaaaaatatgcaaacaaaagattaaagaaatgccgatctgatcacgctcggcagaaatcacgctctggatgaacgatgtgctaagatgcggagacttaaggtcaaaaaaacagaagggtaaaaaatggaaagtctggccagcctctataaaaatcatatagctaccttacaagaacggactcgcgatgcgctggcgcgcttcaagctggatgcgttacttattcactccggcgagctgttcaatgtttttctcgacgatcatccctatccgtttaaagtgaacccgcaattcaaagcgtgggtgccggtaactcaggtgccaaactgctggttgctggtggatggcgtgaacaagccgaaactgtggttctatctgccggttgattactggcacaacgtcgaaccgctgccgacctctttctggactgaagatgtggaagtgatcgcgctgccgaaagccgatggcattggtagcctgctgcctgctgcgcgcggcaatatcggttatatcggtccggtgccggaacgtgcgctgcaactgggtattgaggccagcaacatcaacccgaaaggggttatcgactacctgcattactatcgctccttcaaaactgagtacgaactggcctgtatgcgtgaagcgcagaaaatggcggtcaacggtcaccgcgcggcagaagaagcgttccgttctggcatgagcgagttcgatatcaacattgcctatctgaccgcgaccggtcatcgtgataccgacgtaccttacagcaacattgtggcgcttaacgaacacgctgcggtactgcattacaccaaactggaccatcaggcaccggaagagatgcgcagcttcctgctggatgccggggcagaatataacggctatgcggctgacctgacccgtacctggagcgcaaaaagtgacaacgactacgcgcagctggtgaaggacgttaatgatgaacaactggcgctgatcgccaccatgaaagcaggcgtcagctatgtggattaccacatccagttccatcagcgcatcgccaaactgctgcgtaaacatcaaatcatcaccgatatgagtgaagaagcgatggtcgaaaacgatcttaccgggccgtttatgccgcatggtatcggccatccgctgggcctgcaggtgcatgacgtcgctggttttatgcaggatgatagcggtacgcacctcgcggcaccggcaaaatatccgtacctgcgctgcacccgtattctccagccgggcatggtgttaaccatcgaaccgggtatctacttcatcgaaagcctactggcaccgtggcgtgaagggcagttcagcaagcacttcaactggcagaaaattgaagcactgaaaccgttcggcggcattcgtatcgaagacaacgtggtgatccacgaaaacaacgtggaaaacatgacccgggatctgaaactggcgtgatggaaagctggttaattcctgcggcaccggtcacggtcgttgaagagatcaaaaagagccgcttcataacgatgttggcgcataccgatggcgttgaggcggcgaaagcgtttgttgaaagcgtgcgggcagaacaccccgatgcccggcaccattgcgtggcgtgggtcgcgggtgcgccggatgattctcaacagctgggtttctctgacgacggggagccggcgggaacggcaggtaaaccgatgctcgcccagctaatgggcagcggcgtcggggaaattaccgctgtggtagtgcgctactacggcggcatattgcttggcaccggtgggttagtgaaagcgtatggcggcggcgtgaatcaggcgctgcgccagctaacgacccaacgcaagacgccattaaccgaatatactttgcaatgtgaatatcatcagttaaccggcattgaagcgttgctggggcagtgtgacggcaaaattatcaacagtgattatcaggcattcgttctgctgcgggtggcgcttccggcggcgaaagtggctgaattttccgcaaagctggcggattttagccgtggtagtttgcaattgttagcgattgaagaataatccccacttcgttttgcagaactaaggaagcggcagagatgcattttcgcgccattacccgaatcgttggactactggtcatcttatttagtgggaccatgattatccctgggctggtagcactcatctaccgggatggagcgggccgcgcttttacccagaccttttttgtcgccctcgccattggctctatgctgtggtggccgaaccgcaaagagaaaggcgaacttaaatcccgtgaggggtttctgatagtggtgctgttctggaccgtgctgggtagcgtcggtgcgctcccttttatcttcagcgaaagcccgaacctcacgattaccgatgcgttttttgaatctttctctggcctgaccactacgggagccactacgctggtggggctggatagcctccctcacgccatcctcttttatcgccagatgctgcaatggtttggcgggatggggatcatcgtgttggcggttgcgatactgcctatcctcggcgtgggtgggatgcagctctatcgcgcagaaatgcccggcccgctgaaagataacaaaatgcgcccgcgaattgcggaaacggcgaaaaccctgtggttgatttatgtcttgctgaccgtcgcctgtgcgctggcgttgtggtttgccggaatggatgcctttgatgccatcggccatagctttgcgactatcgctattggcggcttcagcacacatgatgccagtatcggttatttcgatagcccgactattaacactatcattgctatcttcctgctgatctccggctgtaactacggtctgcactttagtctgttaagtgggcgtagtctgaaggtttattggcgcgatccggaatttcgcatgtttatcggcgtacagtttacgctggtggttatttgtaccctcgtactgtggtttcataatgtctacagtagcgcgctgatgacaattaaccaggcgtttttccaggtggtgagcatggcgacaaccgccgggtttacaactgacagcattgcccgctggccgctctttttgccggtactgcttttatgtagtgcctttatcggcggttgcgccgggagtacgggcggtggcctgaaggtgatccgcatcctgctgctgtttaagcaggggaaccgtgagctgaaacgactggtgcatccgaacgccgtctatagcattaagctggggaatcgcgcactgccggaacgtatcctcgaagccgtttggggatttttctccgcctatgcattggtgtttattgtcagtatgctggcgattatcgccacgggcgtggatgacttttctgcctttgcgagcgttgttgcgacattgaataacctggggccagggcttggcgtggttgctgataactttaccagtatgaacccggtggctaaatggatcctgattgccaacatgctgtttggtcgtctcgaggtctttacattgctggtgctctttaccccgactttctggcgtgaatgatggagtaatacgtgaaaacattaattcttttcagtacaagggacggacaaacgcgcgagattgcctcctacctggctagcgaactgaaagaactggggatccaggcggatgtcgccaatgtgcaccgcattgaagaaccacagtgggaaaactatgaccgtgtggtcattggtgcttctattcgctatggtcactaccatagtgcgttccaggaatttgtcaaaaaacatgcgacgcggctgaatagcatgccgagcgccttttactccgtgaatctggtggcgcgcaaaccggagaagcgtactccacagaccaacagctacgcgcgcaagtttctgatgaacagccaatggcgtcccgatcgctgcgcggtcattgccggggcgctgcgttacccacgttatcgctggtacgaccgttttatgatcaagctgattatgaagatgagtggcggtgaaacggatacgcgcaaagaagttgtctataccgattgggagcaggtggcgaatttcgcccgagaaatcgcccatttaaccgacaaaccgacgctgaaataagcataaagaataaaaaatgcgcggtcagaaaattattttaaatttcctcttgtcaggccggaataactccctataatgcgccaccactgacacggaacaacggcaaacacgccgccgggtcagcggggttctcctgagaactccggcagagaaagcaaaaataaatgcttgactctgtagcgggaaggcgtattatgcacaccccgcgccgctgagaaaaagcgaagcggcactgctctttaacaatttatcagacaatctgtgtgggcactcgaagatacggattcttaacgtcgcaagacgaaaaatgaataccaagtctcaagagtgaacacgtaattcattacgaagtttaattctttgagcgtcaaacttttaaattgaagagtttgatcatggctcagattgaacgctggcggcaggcctaacacatgcaagtcgaacggtaacaggaagaagcttgcttctttgctgacgagtggcggacgggtgagtaatgtctgggaaactgcctgatggagggggataactactggaaacggtagctaataccgcataacgtcgcaagaccaaagaggggtaccttcgggcctcttgccatcggatgtgcccagatgggattagctagtaggtggggtaacggctcacctaggcgacgatccctagctggtctgagaggatgaccagccacactggaactgagacacggtccagactcctacgggaggcagcagtggggaatattgcacaatgggcgcaagcctgatgcagccatgccgcgtgtatgaagaaggccttcgggttgtaaagtactttcagcggggaggaagggagtaaagttaatacctttgctcattgacgttacccgcagaagaagcaccggctaactccgtgccagcagccgcggtaatacggagggtgcaagcgttaatcggaattactgggcgtaaagcgcacgcaggcggtttgttaagtcagatgtgaaatccccgggctcaacctgggaactgcatctgatactggcaagcttgagtctcgtagaggggggtagaattccaggtgtagcggtgaaatgcgtagagatctggaggaataccggtggcgaaggcggccccctggacgaagactgacgctcaggtgcgaaagcgtggggagcaaacaggattagataccctggtagtccacgccgtaaacgatgtcgacttggaggttgtgcccttgaggcgtggcttccggagctaacgcgttaagtcgaccgcctggggagtacggccgcaaggttaaaactcaaatgaattgacgggggcccgcacaagcggtggagcatgtggtttaattcgatgcaacgcgaagaaccttacctggtcttgacatccacggaagttttcagagatgagaatgtgccttcgggaaccgtgagacaggtgctgcatggctgtcgtcagctcgtgttgtgaaatgttgggttaagtcccgcaacgagcgcaacccttatcctttgttgccagcggtccggccgggaactcaaaggagactgccagtgataaactggaggaaggtggggatgacgtcaagtcatcatggcccttacgaccagggctacacacgtgctacaatggcgcatacaaagagaagcgacctcgcgagagcaagcggacctcataaagtgcgtcgtagtccggattggagtctgcaactcgactccatgaagtcggaatcgctagtaatcgtggatcagaatgccacggtgaatacgttcccgggccttgtacacaccgcccgtcacaccatgggagtgggttgcaaaagaagtaggtagcttaaccttcgggagggcgcttaccactttgtgattcatgactggggtgaagtcgtaacaaggtaaccgtaggggaacctgcggttggatcacctccttaccttaaagaagcgttctttgaagtgctcacacagattgtctgatgaaaatgagcagtaaaacctctacaggcttgtagctcaggtggttagagcgcacccctgataagggtgaggtcggtggttcaagtccactcaggcctaccaaatttgcacggcaaatttgaagaggttttaactacatgttatggggctatagctcagctgggagagcgcctgctttgcacgcaggaggtctgcggttcgatcccgcatagctccaccatctctgtagtgattaaataaaaaatacttcagagtgtacctgcaaaggttcactgcgaagttttgctctttaaaaatctggatcaagctgaaaattgaaacactgaacaacgaaagttgttcgtgagtctctcaaattttcgcaacacgatgatgaatcgaaagaaacatcttcgggttgtgaggttaagcgactaagcgtacacggtggatgccctggcagtcagaggcgatgaaggacgtgctaatctgcgataagcgtcggtaaggtgatatgaaccgttataaccggcgatttccgaatggggaaacccagtgtgtttcgacacactatcattaactgaatccataggttaatgaggcgaaccgggggaactgaaacatctaagtaccccgaggaaaagaaatcaaccgagattcccccagtagcggcgagcgaacggggagcagcccagagcctgaatcagtgtgtgtgttagtggaagcgtctggaaaggcgtgcgatacagggtgacagccccgtacacaaaaatgcacatgctgtgagctcgatgagtagggcgggacacgtggtatcctgtctgaatatggggggaccatcctccaaggctaaatactcctgactgaccgatagtgaaccagtaccgtgagggaaaggcgaaaagaaccccggcgaggggagtgaaaaagaacctgaaaccgtgtacgtacaagcagtgggagcacgcttaggcgtgtgactgcgtaccttttgtataatgggtcagcgacttatattctgtagcaaggttaaccgaataggggagccgaagggaaaccgagtcttaactgggcgttaagttgcagggtatagacccgaaacccggtgatctagccatgggcaggttgaaggttgggtaacactaactggaggaccgaaccgactaatgttgaaaaattagcggatgacttgtggctgggggtgaaaggccaatcaaaccgggagatagctggttctccccgaaagctatttaggtagcgcctcgtgaattcatctccgggggtagagcactgtttcggcaagggggtcatcccgacttaccaacccgatgcaaactgcgaataccggagaatgttatcacgggagacacacggcgggtgctaacgtccgtcgtgaagagggaaacaacccagaccgccagctaaggtcccaaagtcatggttaagtgggaaacgatgtgggaaggcccagacagccaggatgttggcttagaagcagccatcatttaaagaaagcgtaatagctcactggtcgagtcggcctgcgcggaagatgtaacggggctaaaccatgcaccgaagctgcggcagcgacactatgtgttgttgggtaggggagcgttctgtaagcctgtgaaggtgtgctgtgaggcatgctggaggtatcagaagtgcgaatgctgacataagtaacgataaagcgggtgaaaagcccgctcgccggaagaccaagggttcctgtccaacgttaatcggggcagggtgagtcgacccctaaggcgaggccgaaaggcgtagtcgatgggaaacaggttaatattcctgtacttggtgttactgcgaaggggggacggagaaggctatgttggccgggcgacggttgtcccggtttaagcgtgtaggctggttttccaggcaaatccggaaaatcaaggctgaggcgtgatgacgaggcactacggtgctgaagcaacaaatgccctgcttccaggaaaagcctctaagcatcaggtaacatcaaatcgtaccccaaaccgacacaggtggtcaggtagagaataccaaggcgcttgagagaactcgggtgaaggaactaggcaaaatggtgccgtaacttcgggagaaggcacgctgatatgtaggtgaagcgacttgctcgtggagctgaaatcagtcgaagataccagctggctgcaactgtttattaaaaacacagcactgtgcaaacacgaaagtggacgtatacggtgtgacgcctgcccggtgccggaaggttaattgatggggttagccgcaaggcgaagctcttgatcgaagccccggtaaacggcggccgtaactataacggtcctaaggtagcgaaattccttgtcgggtaagttccgacctgcacgaatggcgtaatgatggccaggctgtctccacccgagactcagtgaaattgaactcgctgtgaagatgcagtgtacccgcggcaagacggaaagaccccgtgaacctttactatagcttgacactgaacattgagccttgatgtgtaggataggtgggaggctttgaagtgtggacgccagtctgcatggagccgaccttgaaataccaccctttaatgtttgatgttctaacgttgacccgtaatccgggttgcggacagtgtctggtgggtagtttgactggggcggtctcctcctaaagagtaacggaggagcacgaaggttggctaatcctggtcggacatcaggaggttagtgcaatggcataagccagcttgactgcgagcgtgacggcgcgagcaggtgcgaaagcaggtcatagtgatccggtggttctgaatggaagggccatcgctcaacggataaaaggtactccggggataacaggctgataccgcccaagagttcatatcgacggcggtgtttggcacctcgatgtcggctcatcacatcctggggctgaagtaggtcccaagggtatggctgttcgccatttaaagtggtacgcgagctgggtttagaacgtcgtgagacagttcggtccctatctgccgtgggcgctggagaactgaggggggctgctcctagtacgagaggaccggagtggacgcatcactggtgttcgggttgtcatgccaatggcactgcccggtagctaaatgcggaagagataagtgctgaaagcatctaagcacgaaacttgccccgagatgagttctccctgactccttgagagtcctgaaggaacgttgaagacgacgacgttgataggccgggtgtgtaagcgcagcgatgcgttgagctaaccggtactaatgaaccgtgaggcttaaccttacaacgccgaaggtgttttggcggattgagagaagattttcagcctgatacagattaaatcagaacgcagaagcggtctgataaaacagaatttgcctggcggcagtagcgcggtggtcccacctgaccccatgccgaactcagaagtgaaacgccgtagcgccgatggtagtgtggggtctccccatgcgagagtagggaactgccaggcatcaaataaaacgaaaggctcagtcggaagactgggcctttcgttttatctgttgtttgtcggtgaacgctctcctgagtaggacaaatccgccgggagcggatttgaacgttgcgaagcaacggcccggagggtggcgggcaggacgcccgccataaactgccaggcatcaaattaagcagaaggccatcctgacggatggcctttttgcattggcgcagaaaaaaatgccggatgcgacgctggcgcgtcttatccagcctactcttgcttatccgttctgcttttgcatccactccaccacaaaatcagccagcccctcaacatcattaatatccagtaatgcgacatcaagattaagcggcacatcactggctacagcaataacatgcctgtctatcactaattcttcaggtcgatgtccggctccatcgcgaaacagcacaatctttgcgatctcttcatgcttaaacccttcgaccagaatcaaatccagcttactggtatccattcgacttgcgagaaactgtagatccagctcttcttcgtctggtgtttccgtcatcaaggcccatcgttgctggctggcaacgatggtttgtaccgcgccagccttgcgcagctcatagctatctttgcctggcttatcaacatccatatcatggtgcgtatgcttaatcagccctggacggatccctctggcgcataatgccgggatcagttttttcaaaagcgtagtttttccggtaccactccacgcggcaaaggcgagtaacggtatcatcgtttttcctgccatcgggcaagctcctctggcgtattcacgttaacaaatgcatctttatgatcgctgaaatcaaccgcatgaccgccagccagacgcataaataccattacccggcgttctcctgcttgcagatattccagtaataaaggctcaatagcgcggtttaccagagcaatagtcgggtgatcgcgttcaccgtcatggacccacacgacaggcgcatctttgcgctgatgattaagcctggctgctaaatcagggggaatgtaaggcgtatcgcacgggcaaaacaaaaaccactcaccagcttcctgctgcattacactaagcattcctgccagagggcctgggtaatccgccagactatcttcaatcactttcagaccgcttgcctgatagatttcctgatgacgattagcattaaccacgacgtgagagagctgcgtcataagcgcgtcagcgacatgttgccataatggtttgccgtttaattcaagcaatcctttatctacgccgcccattcgtctggctttaccgcctgccagcacaacgcctgttatcgtcgtcatcagattcaccgatatcgcctcttttattgtgggattgaccctgctaacgtgtctgtctcaagagtaaggagcatcactatgaaatgtaaacgtctgaatgaagttattgaactcctccagccagcctggcaaaaagagccagaccttaacctgctgcaatttttgcagaaactggcgaaagagagtggttttgacggcgaactggcggatttgacggatgacattctgatctatcacctgaaaatgcgtgattccgcgaaagatgcggtgatcccgggtttgcagaaagattatgaagaagacttcaaaacggcgctgttacgcgctcgcggcgtaattaaagagtaaaagcttgtaagcggcgccaccaaaatcatcgtgaaatgatatccttcgtcattcgtaatgttttccggatgatgggatgaataacagcgcttttactttccagacactacacccggataccatcatggacgctctgtttgagcatgggatccgggtggattccggtcttaccccgcttaacagctatgaaaaccgtgtctatcaatttcaggacgaagatcgtcgacgttttgtcgtcaaattttatcgccctgaacgttggacagccgatcaaatcctcgaagaacatcaatttgcgttgcagctggtaaatgatgaagttccggtcgcagcacctgtggcctttaacggtcagactttattgaatcatcagggattttatttcgctgtttttccaagcgtcggtggtcgccagttcgaagctgataatatcgatcagatggaagcggttgggcgttatttagggcgtatgcaccagacggggcgcaaacagctttttatccatcgcccgaccatcggtttgaacgaatatctcattgagccacgcaagctgtttgaggacgctacactgataccttccgggttgaaagcggcattcctgaaagcgacagatgagctgattgccgccgttacagcacactggcgggaagatttcaccgttctgcggctacatggagactgccacgccgggaatattctctggcgcgatggtccaatgtttgttgatctggatgatgcacgtaatggtccagccgttcaggatttgtggatgttgctcaatggcgataaagccgagcagcggatgcaactggaaactattattgaagcttatgaagaatttagcgagttcgacaccgctgaaatcggactgattgaacctttacgcgccatgcgtttggtttattatcttgcctggctaatgcggcgttgggctgatcccgcgttcccgaaaaatttcccgtggttaaccggggaagattactggctgcgacagacggcgacttttatagaacaggcaaaagttctacaagaaccccctttgcaattaacacctatgtattaatcggagagagtagatcatgaaaaagatttggctggcgctggctggtttagttttagcgtttagcgcaagcgcggcgcagtatgaagatggtaaacagtacactaccctggaaaaaccggtagctggcgcgccgcaagtgctggagtttttctctttcttctgcccgcactgctatcagtttgaagaagttctgcatatttctgataatgtgaagaaaaaactgccggaaggcgtgaagatgactaaataccacgtcaacttcatgggtggtgacctgggcaaagatctgactcaggcatgggctgtggcgatggcgctgggcgtggaagacaaagtgactgttccgctgtttgaaggcgtacagaaaacccagaccattcgttctgcttctgatatccgcgatgtatttatcaacgcaggtattaaaggtgaagagtacgacgcggcgtggaacagcttcgtggtgaaatctctggtcgctcagcaggaaaaagctgcagctgacgtgcaattgcgtggcgttccggcgatgtttgttaacggtaaatatcagctgaatccgcagggtatggataccagcaatatggatgtttttgttcagcagtatgctgatacagtgaaatatctgtccgagaaaaaataattcaatgtaaattacataaagcccgtgaatattcacgggctttttttattatttaataaatataaatacattctgataatgcatcctgccgctggacattatttcagcataagtggatattcaaagttttgctgttttatcagggaatatttatatgatacgtaagagtgctacaggtgttattgttgcgttagccgtaatctggggtggtggcacatggtacacaggtacgcaaattcagcctggtgtcgaaaaatttattaaagattttaacgatgctaaaaagaaaggtgaacatgcctacgatatgacgttaagttatcaaaattttgacaaaggcttttttaattcccgttttcaaatgcaaatgacattcgataacggtgcacccgatctcaatatcaagccaggccagaaagttgtatttgatgtggatgttgagcacggtccgttgcccatcacaatgttaatgcatggtaatgtcatcccagcactggcagcggcaaaagtgaacttagtgaataatgaactgacacaaccgctatttatcgccgcgaaaaataaaagccccgtggaagcgacattgcgattcgcgtttggtggcagtttctctacgacattagatgttgcccctgcagagtatggaaagttttcttttggtgagggccagtttacttttaatggtgatggtagtagtttgtctaacctggatattgaaggcaaagtcgaagatattgttctgcaattaagtccaatgaacaaagtaacggcaaaaagttttaccattgattctctggcgcgattagaagaaaagaaatttccggttggtgaaagcgagagcaaatttaatcagattaacattatcaatcacggggaagacgttgcccaaatcgatgctttcgttgcaaaaaccaggctggatcgcgttaaagacaaagattatatcaatgtcaatctcacctacgaacttgataagttaacaaaagggaatcagcaactcggtagtggtgagtggagtttgattgctgaatctattgatcccagtgcagtgcgccaatttatcatccagtataacattgcgatgcagaagcagcttgctgcacaccctgagttagcaaacgatgaagttgctctgcaagaagtgaatgctgcattgttcaaagagtatttaccgttattacaaaaaagtgagccgaccattaaacaaccggtaagatggaagaacgcactcggcgaactaaatgccaatctggatatcagtattgccgacccagccaaatctagtagttccacaaacaaagatatcaaaagcctcaattttgatgtgaagttaccgcttaatgtcgtcacagaaaccgcaaaacagcttaatttatctgaaggaatggatgcggaaaaagcgcaaaagcaggctgataaacaaatcagcgggatgatgacattaggtcagatgtttcagttaatcacgattgacaacaataccgccagcctgcagctgcgttatacaccgggtaaagttgtttttaacggacaggagatgagcgaagaagaatttatgtctcgtgccggacgttttgttcattaaaatactcactcgcctctgctcattcagaggcgagtaaaacttacttattctgacgctgactactcatgagagacgtcagaagccggtctttttcctgccacaaactgttcagccattgctgaaaatggcgcttaaagcttttgtcattgatgtagtcgccatgtaactcatcggcaataggctgtaaatccacatgtacgacaatccgcgtcagtttaccgcttaacatatcgaagaacggctgacggttattgtccggataacacagcgtaacattaagcagtttatcgaattgtttacccagtacatttagcgccatcgcaatgcctgccgcctttggtggcaacaagttttgaaaagtggagtgggtttgctgatgtttttcttgcgtgaaacgggagccttcaacgaaattgacaatggtggtgggatgcaggcgaaacttttcacaagaacgccgagtggtttcaacatctttaccacgtcgctccggatgacgtaataaataagcgcgggaataacgcttcataaacggcatatccaggctccagcacgccaggccaagaaatggcacccaggccagctgttgcttgaggaaatatttattcatcggaatgtgcttacgaaacagcacgcacagtacgacaacatctgcccaactacggtggttacaaataagcagataccagttcttcttacttaacccttccagcccgtgaacttcccattgaaggtgtgggttcagatgcagtaataccgccagaccttcacaccagcaatacatcataaaatcacaaaaacggctaacctttcgccaaatgactggcacaggtagcaatagttttacaatcccggcaatgatgatcgggacggaacaaaaaatagtgaccaaaatggtcaatacgatactcagcaaaagggttatcgcagcgagtattctcgtcataatgaatttattcaaaaggttagccatagacagtgcgctaaagaagcgcaaggcgcagattttagcagaaaacgacccaaataacggatgatccttaaggagaaaaataattcatatctatccacattagaaaaaatcccattatctcaattattagggatggatttatttttaactgcatgaaaaacaaagacaaacatcatgctgtaaaaagcatgataataaattaaaagcgatgtaaataatttatgcacaaagttatccacatgacgatttgcgagcgatccagaagatctacaaaagattttcacgaaaagcggtgaaaaactcatgttttcatcctgtctgtggcatcctttacccataatctgataaacaggcacggacattatggttcagatcccccaaaatccacttatccttgtagatggtagttcttatctttatcgcgcatatcacgcgtttcccccgctgactaacagcgcaggcgagccgaccggtgcgatgtatggtgtcctcaacatgctgcgcagtctgatcatgcaatataaaccgacgcatgcagcggtggtctttgacgccaagggaaaaacctttcgtgatgaactgtttgaacattacaaaagtcatcgcccgccaatgccggacgatctgcgtgcacaaatcgaacccttgcacgcgatggttaaagcgatgggactgccgctgctggcggtttctggcgtagaagcggacgacgttatcggtactctggcgcgcgaagccgaaaaagccgggcgtccggtgctgatcagcactggcgataaagatatggcgcagctggtgacgccaaatattacgcttatcaataccatgacgaataccatcctcggaccggaagaggtggtgaataagtacggcgtgccgccagaactgatcatcgatttcctggcgctgatgggtgactcctctgataacattcctggcgtaccgggcgtcggtgaaaaaaccgcgcaggcattgctgcaaggtcttggcggactggatacgctgtatgccgagccagaaaaaattgctgggttgagcttccgtggcgcgaaaacaatggcagcgaagctcgagcaaaacaaagaagttgcttatctcagttaccagctggcgacgattaaaaccgacgttgaactggagctgacctgtgaacaactggaagtgcagcaaccggcagcggaagagttgttggggctgttcaaaaagtatgagttcaaacgctggactgctgatgtcgaagcgggcaaatggttacaggccaaaggggcaaaaccagccgcgaagccacaggaaaccagtgttgcagacgaagcaccagaagtgacggcaacggtgatttcttatgacaactacgtcaccatccttgatgaagaaacactgaaagcgtggattgcgaagctggaaaaagcgccggtatttgcatttgataccgaaaccgacagccttgataacatctctgctaacctggtcgggctttcttttgctatcgagccaggcgtagcggcatatattccggttgctcatgattatcttgatgcgcccgatcaaatctctcgcgagcgtgcactcgagttgctaaaaccgctgctggaagatgaaaaggcgctgaaggtcgggcaaaacctgaaatacgatcgcggtattctggcgaactacggcattgaactgcgtgggattgcgtttgataccatgctggagtcctacattctcaatagcgttgccgggcgtcacgatatggacagcctcgcggaacgttggttgaagcacaaaaccatcacttttgaagagattgctggtaaaggcaaaaatcaactgacctttaaccagattgccctcgaagaagccggacgttacgccgccgaagatgcagatgtcaccttgcagttgcatctgaaaatgtggccggatctgcaaaaacacaaagggccgttgaacgtcttcgagaatatcgaaatgccgctggtgccggtgcttagtcgcattgaacgtaacggtgtgaagatcgatccgaaagtgctgcacaatcattctgaagagctcacccttcgtctggctgagctggaaaagaaagcgcatgaaattgcaggtgaggaatttaacctttcttccaccaagcagttacaaaccattctctttgaaaaacagggcattaaaccgctgaagaaaacgccgggtggcgcgccgagtacgagcgaagaggtactggaagaactggcgctggactatccgttgccaaaagtgattctggagtatcgtggtctggcgaagctgaaaagcacctacaccgacaagctgccgctgatgatcaacccgaaaaccgggcgtgtgcatacctcttatcaccaggcagtaactgcaacgggacgtttaagcagtaccgatcctaacctgcaaaacattccggtgcgtaacgaagaaggtcgtcgtatccgccaggcgtttattgcgccagaggattatgtgattgtcagtgcggactacagccagattgaactgcgcattatggcgcatcttagccgtgacaaaggcttgctgaccgcattcgcggaaggaaaagatatccaccgggcaacggcggcagaagtgtttggtttgccactggaaaccgtcaccagcgagcaacgccgtagcgcgaaagcgatcaactttggtctgatttatggcatgagtgctttcggtctggcgcggcaattgaacattccacgtaaagaagcgcagaagtacatggacctttacttcgaacgctaccctggcgtgctggagtatatggaacgcacccgtgctcaggcgaaagagcagggctacgttgaaacgctggacggacgccgtctgtatctgccggatatcaaatccagcaatggtgctcgtcgtgcagcggctgaacgtgcagccattaacgcgccaatgcagggaaccgccgccgacattatcaaacgggcgatgattgccgttgatgcgtggttacaggctgagcaaccgcgtgtacgtatgatcatgcaggtacacgatgaactggtatttgaagttcataaagatgatgttgatgccgtcgcgaagcagattcatcaactgatggaaaactgtacccgtctggatgtgccgttgctggtggaagtggggagtggcgaaaactgggatcaggcgcactaagattcgcctgaacatgccttttttcgtaagtaagcaacataagctgtcacgttttgtgatggctattagaaattcctatgcaacaactgaaaaaaaattacaaaaagtgctttctgaactgaacaaaaaagagtaaagttagtcgcgtagggtacagaggtaagatgttctatctttcagaccttttacttcacgtaatcggatttggctgaatattttagccgccccagtcagtaatgactggggcgttttttattgggcgaaagaaaagatccgtaatgcctgatgcgctatgtttatcaggccaacggtagaattgtaatctattgaatttacgggccggatacgccacatccggcacaagcattaaggcaagaaaattattcgccgtcctgcgtttcttctacaggctgcatctcgctaaaccaggtatccagtttctgccgcagcttgtccacgccttgtttcttcaagctagaaaacgtttcaacctgcacatcaccgttaaacgccagtacagcttcacgcaccatattcaattgcgctttacgtgcgccgcttgccagtttgtccgctttggtcagcagcaccagaacggcgatattgctgtctaccgcccactcaatcatctgctgatccaaatctttcagcggatggcgaatatccattagcaccaccagaccttgcaggctctgacgtttttcgaggtattcgccgagcgcacgctgccatttgcgcttcatctcttccgggacttccgcataaccgtacccaggcaagtcaaccagacgcttgccgtcagccacttcaaacaggttgataagctgggtgcgccctggggttttactggtacgagccaggcttttctggttagtcagcgtgttcagcgcgctggatttacctgcgttggaacggcctgcaaaagccacttcaattccggtatcggaaggtaggtggcgaatatcaggcgcactcatcacaaaatgcgtctgttgataattcaaattagtcaaagcggtcgtctccgtcagtcaaagctttgtggcgattatacctgaaccataataaaaggcggatttttcggcgtgagcgttgtaagtaaaagccatacgctttgtgagacattgccgatagtctttatgcgaaatagcagagaaaattctgcgatgcatgtcaaataagctatataaatcagtgaattgcttttatataaaactctgaaaatgtgcaaatactgatggcggttgattgtttgtttaaagcaaaggcgtaaagtagcacccatagagcgaggacgctaacaggaacaatgactcaggatgagggtcaggagcgccaggaggcgaagacagaggattgtcaggaagacaaacgtccggagacgtaattaaacggaaatggaatcaacacggattgttccggctaaaggaaaaacagggtgtgttggcggcctgcaaggattgtaagacccgttaagggttatgagtcaggaaaaaaggcgacagagtaatctgtcgccttttttctttgcttgctttctgttagattccgccgcaaatctatactgaataaaacggctaaaagacgaaccattatgaaaccaagttctagtaacagtcgcagcaaaggtcatgcaaaagcgcgtcgaaaaacacgcgaggagctggatcaggaagctcgtgatcgcaagcgtcagaaaaaacgtcgtggtcatgcgccgggcagccgcgcagcgggcggaaacaccacgagtggcagcaaaggccagaacgcaccaaaagatccacgtattggcagtaaaacccctattccattgggcgtgactgaaaaagtcaccaaacagcacaaaccgaagagtgagaaacctatgcttagtccgcaggcggagttggaattactggaaacggatgagcgtctggatgcgctgctggaacgtctggaagcaggcgaaaccctgagtgccgaagagcaatcctgggtggatgctaaactggatcgtattgatgagttgatgcagaaactcggcctctcttatgacgatgacgaagaagaggaagaagacgagaagcaagaagacatgatgcgtctgctgcggggcaactaacggattgccgccgtgggccttcccgttctgctgataacccttccggttatatgttatctggtgtggttattcgttaaactacagcggttgtcgcggcgacaaaagtggctgcgcaaccggctgatgacccgaaacgggcatccgccggtacgccgtagccgccagagacgccatcggaaggagtgagcatgtctgtacagcaaatcgactgggatctggccctgatccagaaatataactattccgggccacgatacaccagctacccgaccgcgctggagtttagtgaagacttcggcgaacaggcgtttttacaagccgtggcgcgctatcctgagcgtccattatctctctacgtacatatcccgttctgccataagctttgttacttctgcggttgcaataagattgttactcgccagcagcacaaggccgatcagtatctggacgcgctggagcaagaaatcgtccatcgtgcaccgctgttcgccgggcgtcacgtcagccaattgcactggggcggcggaacgccgacgtatctgaataaagcgcaaatcagccgcctgatgaagctgctgcgcgaaaacttccagttcaatgccgatgcggagattagcatcgaagtcgatccgcgggaaatcgaactggatgtactcgatcatttacgcgccgaaggctttaatcgcctgagcatgggcgtgcaggacttcaacaaagaagtgcaacgtctggttaaccgcgagcaggatgaagagttcatctttgcactgcttaaccatgcgcgtgagattggttttacctccaccaacatcgacctgatttacggcctgccgaaacagacgccggagagtttcgcctttaccctgaaacgtgtggcggagctgaaccccgatcgtctgagtgtctttaactacgcgcatctgccgaccatttttgctgctcagcgcaaaatcaaagatgctgacctgccgagtccgcagcaaaaactcgatatcctgcaggaaaccatcgccttcctgacgcaaagcggctatcagtttatcggtatggatcactttgcccgtccggatgacgagctggcggtggcccagcgtgaaggcgtgctgcatcgtaacttccagggctacaccactcagggcgataccgatctgctggggatgggcgtttccgccatcagcatgattggcgactgctacgcgcagaaccagaaagagttgaagcagtactatcagcaagtggatgaacaaggcaatgcgctgtggcgtggtattgcgctaacgcgtgatgactgtattcgccgcgatgtgattaagagcctcatctgcaacttccgtctggattacgcccctattgagaaacagtgggatttgcacttcgctgattactttgcggaagatctcaagctgctcgccccgttagcaaaagatgggctggtggatgtggatgagaagggaatacaggtgacggcgaaaggtcgcttgctgatccgcaacatttgcatgtgctttgatacctatctgcgccagaaagcgcggatgcagcagttctctcgggtgatttaaatagtgaatggcgcttcgtttacaaagtagaaaacgaaagcgccatcaatgtgctgagaacaagattgcctgatgcgctgggcaacaaaacctgttgaaattattgcttttgtaggccggataaggcgtttacgccgcatcaggcatctgagcatgatgcctgatgcggcgctggtcgcgtcttatcaggcctacgactttctccgcatccggcataaacaacgagcttcagctaaacagcccaatcattgcggcacacagcacggcagcaacggcagtttgcggtgtgtggctgtcaactgcgccactcgataccagattaattattgattccagcataatgactctccccgttttccgggcaagatcatactgaacttatcggaacagtaaagcgtaaaataccagcaatttgcgctcaataatcaatctttacacacaagctgtgaatcactccatccccagctcttttaacttacgcgtcagggtgttgcggccccagccgagtagccgcgccgcttcctgtttatgcccctgcgtatgtcgcaacgcggtcgtcagtaacgtccgctccagctctggctgcgcttcggaaagcagattttgatgaccggaacgcagcgctctgtctgcccactgcgcaagaagcgtcgcccagctgtccggttgcatttggctagtactctccgcaaccgtactttcaaacagttcgccgggcaaatcctgaatcaacacttcctgcccggcggccatcaccgttagccagcggcaggtgttttccagctggcgcacgttgcctggccacgccagacgcgtcagagcagcttcggtttccggatgcagtaacttcgcttctacgcccagttcgcgcgcggcaacctgtaaaaaatggcgcgccagacggggaatatcttcccgacgttcgcgcagcggcggcagatgaacgcggataacgttcaggcggtggaacagatcctcacggaacttaccttcctgcactcgctgttcgagattctggtgagtggcagcgataatccgcacatccactttcaccggcgcatagccgccaacgcggtaaaactgaccgtctgccagcacgcgcagcaaacgcgtctgcacatccagcggcatatcaccaatttcgtcgaggaataatgtaccgccatcggcctgttcaaaacgcccctgacgaatggtattcgcgccagtaaacgcgcctttctcgtggccaaacagttcactttcgatcaaatcttttgggatagctgccatattcagcgcgataaacggcgctttggcgcgcggactgtggcgatgcagggcatgagcgaccagttctttaccggtgccggattcgccgttaatcagcacgctaatagaagaacggctaagccgaccgataatacggaacacgtcctgcatggctggcgcttcgccgatgatatcggtcgttgggccgttaagctgaacattacgcggctgctgctgttcctggtaatgactgatagcgcgctcaaccagcgccactgcttcgtcgatatcaaacggtttgggcagataatcaaacgccccttgttgataggcgctgacggcagcatccagatcggaatgtgcggtcataatgatgaccggaagcattggatggcgctgtttaatctgcttgagcagcgccagcccgtccattcccggcatacggatatcactaagcagcacatccggcgttttgctcgccagcgcctccagcacttctgcgccgttctcaaacgtcgtacaggttaaacctgccccagcgagcgcacgttcaagcacccaacggatggaactatcgtcatcgactacccagactatccctcgttgcataaacgtcacctttatttcctgataggcaggtaaacgctgaactcggtatgccctggccaactggtaaattcaattttgccactatgctgatcaatcaaattacgagcgatggataagccaagcccggtgccaccttcgcggccgctgaccatcgggtaaaacagcgtatcctgcaaatgaggcggaatgcccggcccgttatcttccacatcaatccgcgccgccagccggtagcgctcgccgtgtaaggtcagttgaaacgcggtgcgggtacgcagaatgatttcaccgccttccggccccagcgcctgtagcgcattgcgcacaatattcagcaagacctgttcaatttgatccgggtcgtgcgccagttccggtaggctgggatcgtaatcacgaatcaaccgcacgttgtccggcagttccatgctcaccagcgttaccacgcgttcagccactttgtgaatactttcggtaacgcgcgtaccgggcagctgcggccccaacagacggtcgaccagatttcgcagccggtccgcctgttcgataatcactttggtatattcgagtagacttgggtcaggtaacgctttgctgagcagctgcgccgcgccacgtaaaccgccaagcggatttttaatctcatgtgccaggccgcgcactaaatcacgggcagcaacctgctgggcgtgctgtagctgttcctgacttaagcggcgctggttatccatcggagccatctccagcaggatcatgccgtccggcatacgctgggccgtcacagaaaggatatggctgcgcccgtcgatgaccagcgtcacttcgttatcggtaaaaccttgccccgcctccagactttcttgcatcagctcgatatttaaactgaagtagctcaacagttccggtaacggtgtaccaaacaatttgcgggagctttgggcgagcagttgttgcgcggcagggttggcgtaatggatcgccaggttgtcatcgattaacaaaatactgttaatcaggctgttgaggatctgcccagcatcgggctgcgtgcctgttgccataaagcagtctcctgaacaggttgcaccattttagtgcattatagctttttacggataaaaagcgcgaagcatcagagaattgacggagaaaaaagcccatgcagagatgggctacagatagctgacaaacttcacgttggagagcgactcacctgctccggcctaccacatcatcaccgtgtaggccggataagacgcatttgcgtcgcatccggcgtgatgtgcttgccaccgatcccaggcctgccagagacaggcgaaaagtttccacggcaactaaaacacttagacgctgtagtacagctcaaactctaccggatgcggagtcatacgcacgcggtcatcttcttcgcgacgcagagcgatgtacgcatcaattgcttcgtcagtgaacacgccaccggctttcaggaactcgcggtccagatccagttcgttcagtgcttcttccagagagcctgcaacctgtgggatctctttcgcttcttctggcggcaggtcatacaggtttttgtccatggcttcgcccggatggatcttgttcttgataccatcaagaccggccatcagcagggcagcaaagcacaggtacgggttagctgccggatccgggaaacgtacttcgatacgacgtgctttcggagaagaaaccaccggaatacggatagacgcagaacggttacgcgcagagtaagccagcattaccggtgcttcatagcccgggaccagacgcttataagagttggtggtcgggtttgccagggcgttaatcgctttagcgtgtttgattacgccgccaatgtagtacagcgcctgctcagacagacctgcgtatttgtcgcctgcgaacaggttaacgccgtttttagacagagacatgtggcagtgcataccggagccgttatcaccgaacatcggttttggcataaaggtcgcggttttaccgaagcggtgcgctacgttgtgcacaacatatttgtagatctgaatttcgtcagcttttttggtcatggtattgaagcgggtagccacttcgttctgaccagcagtcgctacttcgtggtgatgggcttcaaccaccagacccatctgttccatcaccagacacatttcagaacgaatatcctgagcgctgtctaccggtggaaccgggaagtaaccgcctttcactgccggacggtgacctttgttaccaccttcgtattgggtggaggagttccatgcgccttcgatatcgtcgatagcaacgtgggaaccggagatagaacttccgaaacggatgtcatcgaacaggaagaattcaggttctggcccgaacagtacggtgtcggcaatgccagtggaacgcaggtaatcttcggcgcgcttcgcaatggagcgcgggtcacggtcatagccttgcagggtgccaggttcaaggatgtcgcaacggataatcagggtggagtcggcgaagaacgggtcaatcactgcggtggatgcgtctggcatcagcaccatgtcggactcgttaatgcctttccagccgccaatgctggagccgtcaaacattttgccttcttcgaagaattcagcattcacctgatgagcagggatagtgacgtgctgttctttacctttagtatcggtgaagcgcaaatcaacaaacttcacttcgtgctcgttcagcatcgtcagtacgtgttcagcggacatactttaactctcctggattggtcatggtcgtcgtggtaacgaaatctgcaattattttggccgtgtcgccgtaaaaaagataaagcgaaatctgtgccaacttttaaattgcccctaaaaggcgttatcatgcgcaccatcgtgcaaaagggctgcaccacgatgtgaatgttgcaccaatatagtgcttcaatggaaacattaagcaccatgttggtgcaatgacctttggataaccctttttatgctccgtgaaagcgatcacaaagggactctgcaatacttgtttgcggaggatgtttgtgatcctgttttgtagtgcgattaatccgtgtacaataacgcgctatttctaatgcctgaggcaaagttgtgatcgaaaaattgcgtaatatcgccatcatcgcgcacgtagaccatggtaaaaccaccctggtagacaagctgctccaacaatccggtacgttcgactctcgtgccgaaacccaagagcgcgtgatggactccaacgatttggagaaagagcgtgggattaccatcctcgcgaaaaacaccgctatcaaatggaatgattaccgtatcaacatcgttgataccccggggcacgccgacttcggtggtgaagttgaacgtgtaatgtccatggtagacagtgtgctgctggtggttgacgcatttgacggcccgatgccgcaaacgcgcttcgtaaccaaaaaagcgtttgcttacggcctgaagccgattgttgttatcaacaaagttgaccgccctggcgcgcgtcctgattgggttgtggatcaggtattcgatctgttcgttaacctcgacgcgaccgacgagcagctggacttcccgatcgtttacgcttctgcgctgaacggtatcgcgggtctggaccacgaagatatggcggaagacatgaccccgctgtaccaggcgattgttgaccacgttcctgcgccggacgttgaccttgacggtccgttccagatgcagatttctcagctcgattacaacagctatgttggcgttatcggcattggccgcatcaagcgcggtaaagtgaagccgaaccagcaggtcactatcatcgatagcgaaggcaaaacccgcaacgcgaaagtcggtaaagtgctgggccacctcggtctggaacgtatcgaaaccgatctggcggaagctggcgatatcgttgcgatcacgggccttggcgaactgaacatttctgacaccgtttgcgacacgcaaaacgttgaagcgctgccggcactctccgttgatgagccgaccgtttctatgttcttctgcgttaacaccagcccgttctgcggtaaagaaggtaagttcgtaacgtctcgtcagatcctggatcgtctgaacaaagaactggtacacaacgttgcgctgcgcgtagaagaaaccgaagacgccgatgcgttccgcgtttctggtcgtggcgaactgcacctgtctgttctgatcgaaaacatgcgtcgtgaaggtttcgaactggcggtatcccgtccgaaagttatcttccgtgaaatcgacggtcgtaaacaagagccgtatgaaaacgtgactctggacgttgaagaacagcatcagggttctgtaatgcaggcgctgggcgaacgtaaaggcgacctgaaaaacatgaatccagacggtaaaggccgcgtacgtctcgactacgtgatcccaagccgtggtctgattggcttccgttctgagttcatgaccatgacttccggtactggtctgctgtactccaccttcagccactacgacgacgtacgtccgggtgaagtgggtcagcgtcagaacggcgtactgatctctaacggtcagggtaaagcggtcgcgttcgcgctgttcggtctgcaggatcgcggtaagctgttcctcggtcacggtgcagaagtttacgaaggtcagattatcggtattcatagccgctctaacgacctgactgtaaactgcctgaccggtaagaaactgaccaacatgcgtgcttccggtactgacgaagccgttgttctggttccgcctatccgcatgactctggaacaagctctggagttcatcgatgatgacgaactggtagaagtgactccgacctctatccgtattcgtaaacgtcacctgacggaaaacgatcgtcgccgcgccaaccgcgcaccgaaagacgattaatttcgttttttagtcataaaaaacctgccagcgatggcaggtttttttttgcctgtcgtgagcgcacaccaatgcgagtatctcccttataagtctgtggttacgtcaatagagagctttgtcacaattatctgcaaagtcatacgccgttaattgctttcttttttggcgtaagcgtaagatgcttcatctggtttaaaccaaaaggattaaacaatggcggagaatcaatccaccgtagaaaatgcaaaagagaaactggatcggtggttgaaagatggcatcaccacgccgggtggaaaactccctagtgaaagagagctgggagaactgctgggcattaaacgtatgacgctgcgccaggcgttgttgaacctcgaggcagaatccaaaatcttccgtaaggatcgtaaggggtggttcgtgacccagccgcgatttaattacagtccggagctgagcgcgagctttcagcgggccgcaattgagcaagggcgagagccttcctgggggtttaccgagaaaaaccgtaccagcgatattcccgagacgctcgcgccactgattgcagtgacgccaagtactgaactctatcgcatcaccggctggggggcgctggaaggacataaagttttctatcacgaaacatatattaatcctgaagttgctccgggctttattgaacaacttgaaaaccacagtttttctgcagtctgggaaaagtgctaccaaaaagagacggtagtaaaaaaattgattttcaaacccgtcagaatgccgggcgatatcagcaagtatcttggcggttctgcgggtatgccagcgatcttaattgaaaagcatcgcgccgaccagcaaggcaatattgtccaaatagatattgaatattggcgatttgaggccgtagacctcatcattaatctgtaagtgttttatggtgacaataaataacgcaagaaagattctacaacgtgtcgacactcttcctctttatttacatgcttatgcctttcatttaaatatgcggctggaaagagtgttgcctgctgatttacttgatatcgcaagtgaaaataatctacgtggcgtcaaaatccatgttctcgatggcgagcgtttttctcttggtaatatggacgataaagaactctctgcctttggggataaagcccgccgtctgaaccttgatattcatattgaaaccagcgccagtgataaggcatctattgacgaagccgtcgccatcgcgttgaaaactggggcaagctccgtacgtttttatccacgttatgaaggtaatttgcgcgacgtattaagcattatcgctaacgacattgcctatgtacgggaaacgtatcaggacagcggcctgacttttacgatcgagcagcatgaagatttaaaaagtcatgagctggtgagcctggtcaaagaaagtgagatggaatctctttccttactgtttgattttgcgaacatgatcaatgcaaatgagcatcccatcgacgctttaaaaacgatggcaccgcatattacccaggtccatatcaaagatgccttgatcgttaaagaaccgggtggcctgggtcataaagcctgtattagtggtcagggtgatatgccgttcaaagcgttattaacgcaccttatctgcctgggtgatgatgagccgcaggtgacggcatatggcctggaagaagaggttgattactatgcgccggcgttccgctttgaagacgaagatgataatccgtggatcccttatcgccagatgagtgaaacaccattgccagaaaatcatttactggatgcgcggttacgtaaagaaaaagaagatgcaattaatcagataaatcatgtgcgtaacgtactacaacaaatcaaacaagaggcaaaccatcttctgaaccactaataagttttaactcatacgcagttaataaaaccattccatatgaatggtcggtatcttattgcctttaaaacagtgattttaaaaatcgcttaggggatgttatgctcacgaaaaagaaatgggcgttatttagtctattaacactgtgtggcggtacaatttataaattaccgagcctgaaagatgcgttttatatcccgatgcaggaatatttccatttgaccaatggtcaaattggtaatgctatgagcgtaaacagttttgtcaccacagtgggcttttttctgtctatttattttgccgataaactaccgcgcagatacaccatgagtttcagtctcattgcgacaggattactgggtgtttatttgacgacaatgccggggtattggggcatcctctttgtctgggcgctatttggcgttacttgcgacatgatgaactggccggtcttgctcaagagcgtaagtcgattgggcaatagcgaacaacaaggtcggttgtttggcttcttcgaaacagggcgtggcattgtcgataccgtggtggcattttctgcgttggcagtatttacctggtttggcagtggcttattaggttttaaagcaggcatctggttctattcccttattgtgattgccgtaggcattattattttctttgtcctgaatgacaaagaagaggcaccgtccgttgaggtgaaaaaagaagacggagcaagcaaaaacaccagtatgaccagcgtgctgaaagacaaaactatctggcttatcgcttttaacgtcttcttcgtttacgcggtttactgtggcctgacattcttcattccattcctgaaaaacatctatctattgcccgttgcgctggtgggggcttacggcatcattaaccaatactgtctgaaaatgattggtggaccgattggtggcatgattagtgataagatcctgaaaagcccaagtaaatatctatgctacacctttatcattagtaccgctgcgctcgtactgttgattatgctgccgcacgaaagtatgccggtctatttagggatggcatgtacgctgggctttggcgcgatagtctttacacagcgagccgtattttttgcacctatcggcgaagcaaaaattgctgaaaataaaacaggtgcggcgatggcgttgggtagctttattggttacgctccggcgatgttctgcttcagtctgtatggctacattctggatttaaatccggggattattggctacaaaatcgtgtttggcattatggcctgcttcgcattcagtggtgcggtggtttccgtaatgctggttaagcgtattagccaacgtaagaaagagatgctggcggctgaagcttaattaatggccggatgtgcttaatccggccaacgaaaaccgtatcaaccgtaggccggataaggcgtttacgccgcatccggcagtttcacatcagaagaaatacttcgtcccgatacggatctggttttgctcgcggtggtacggttcgacgttgcggtctaaccagcgcaattcgaaataagggagccagtgttcattaatacggtaacggaaggtgttagtgatttcccaatgatgatctttcccgttgctactattaaagtcattcactcgcatgaagtaatgtggctcaaatgtataggaaaatttatcggtgattttaaaattccagtaggtgccaatttcataggtgtcattattatccagttccccgctcaaatctgtactactatagttattatggttatagcgatttcgtactgtcagattaaaccatggtacaaatttatagttgacgtccagatacactgcaccaccgctaccgatactcttatcattaattaagccaccgggctggatggttaatttatcggttggtttaaataacggataccagccttcaatttcgttatatccatgttttagttcatcttctcgctgaaagttgtaggtattggttaacataatacccgcgcccatatcgaagttataacccacacgtagcataacctcgccctgatcggaggcaagattatatgcctccctgttttcgacgtatgcgccagcaaatacgctggcagaggtcagagaagataataaaattattgcattaatctttttcataataagtccattttttaaacgtagggaggccgccacccaccaggatggaaatagcggctattgacatttataacgttacggaagccgttttttcttctgtcgccatctctttatttttgcgttggttgatttcctcaataatcaatgcaaaccgtttttcattgagtgtgtaaaagaatcccatcgtcaatgcagcaataattgccagtgcacaaggccagataaaaatgagctgacgcaaaccctgtaatgtcgcatcgctttgcgcgatgttgggaacataaccaatttgcgtcagcataatgcctggcaagaagccagcaagtgcggcagaaattttacgaaagaaggtataaccggtataaacagaaccttcggcacgaataccggttttccattcaccgtaatctacggtatctggtaccagtgcccagttcaggctgtttacaaaggccgtgccaaaaaaggcgacacaagagaacatgacgaaagtgaaagagttacttccccagaaataattcagtatatcacccaccgcccacagcaccatgccagccagataaacctgttttttaccaaaacattttacagttaatggcaccagtaatacgccgatgaggatgcatcccatactgaagaatcccatccagctcaataaattaatatcattcagcacatactgggtgtaatagacctgaatcgccagtttgatattaaatgccgccagggtacacaagttagcaatgcataaaaccagcaatggcggattccgaaatatcgcgcaaaaacttttgagaatactggctttatgtccggttggcgttgtgtccacataatgctctttgacgcctctgtagcacagcatcataaaaataaagccgccaatggagaacataagtgccgcacaggcataaccgacggtactgtcagaaaaaaggctctgcaacggaataaacgccacggtacaaatcaatagccctatggttgcaccaccctggcggtaagccgcgagctgcgcgcgctcattcgggtttttggtaattgccgggatcatcgcaccatagctgcagttcatcagactgtaactaagtccaaacatcataaacagcgcggtggcaatcgtcgttttaaccggcaaacaaaaggtggtggcgataaactggagcgttgcaattaacgccgccggaaccgctgcatataaaataaagggacgaaatttgcctttaggcccaatatttttccggctgtcgagtaaaaatccggtgagcatatcggtaaacgcggtaaaaaacttcgccaccagaaagataatcccgccatagtaagcaggcatccctaattcatcggtataaaatttgaggagatacagagtaccgatgcagagcattaaattgctaccgacgtcgcccataccataggcgattttttcccgcagattcagttttaatgtcagtggattatggtcagacataatcactccttataacgccccgcagggcgtcgtttattattattacgccgtgcgtttacgggcttctatctcttccacaatgcggacatacatcttctcgttcaggctgtagaagcaacccatcgccacaatggtgactaccgccagtgcgcttgggtagatgaagatcaactggcgtaacccttcaatggtgtggtcagcctgtgcgacgttcggcacatagccaatttgcgtcagcatccagccggggaagaaaccagccagcgcctgagacactttgcgaaagaaggtaaaaccggtgtagaccgttccttcgctacgcacgccggtgcgccactcgccgtactcgacggtgtcggaaaccagcgcccagttcaggctgttaacaaacgcactgccaaagaacgccaggcaggagaacgccacgaagctgacgctaccgccgccgaagaaatagttgagcagatcgcccagcacccaaatcagcaggccgccgatataaactttcttcttgccaaaacgtctgacactggcaggcatcaggaatacgccgatgaaaatacagcccatgctgaaaaatcccatatagctcaacaggatgggatcgttaagcacgtactgggtgtaatagacctggatggcgagcttgacgttaaacgcccctaaagtgcagaggttggcaatgcacagaatgaacagcgggcggttacccgcaattgcgcggaaagattgcagcaggcccggcttttgcgccggattagcaggctgggtttcgacataacgctctttcacgccgctgtagcagatccacataaacagcaggccaaacagactaaacagcgtggcggcgaagatatagccaagttgctgattaccttcgataagattcataactggcacgaatcccaccgtgcacagcagcaggcccagcgtagcgccgccctgacgccatgccgccagactggcgcgttcgttggggtttttggtgatagcgggaaccattgcgccgtaggagcagttcatcatgctgaaaaacagtccgtaaagcataaacagaatagtggccatcaccgttttaccggtgacatcaaacggtgtgccgacaaagttggcgatcgccagtaaggtgaccgggaaactcgcatacagaataaaaggacggaacttaccttttggaccgatcttgcgtcgggaatccaacataatgccggtacccatatcggtaaacgcagtaaagaatttactaatcaaaaagataatgccgccataggtgcctggcagccccagaacgtcggtataaaacttcaaaagataaagcgtaccgatatccagcaggatgttagaggccaggtcgccaataccgtaagagagtttctctttaaagggcaggcgtaaagttgctggatcttccgttgtgatgtgactcatgcttgttctccctttgcccatgagtttccccacgggcggatgtgattagatgctttttaagctcgcgaacagtgccgcccattcgctatcggcgcgataaaagaccggcggcttgccgatgggcgcattaacggtaacttccccgccccggaacgcttcacccgtccaggcgtggacccagttatcctccggcagatagagcgtccagtcgctacggccttcttcatgcaccggagcgaccagaatgtcgcgacctaacaggtactgatatttcagggtgtaagtgtgcgcatcgtcttcgtaatgcaggaacagcgggcgcataaccggcaggccggacttcgcattcagcgcgacggcctctttcaggtaaggtttcagggtggtgaagacggtggtcatacgggcgaaatgggcgatggtttctgcgtcgccgtcaaactgccagttgtcgccaggacggttaccttcgtgggtgcgcatcatcggcgtgaaggcgctgaaatcgcaccagcgcagcagcagctctttgctgcgcttcatctcaaacagggtggtgtaaccgccaatgtcgctgtggtgcaggccatgtccggtcattgccaggctcagcgccgccgggacaacgctcgccaggccatcgtcgagactccagtcgacgttctggtcgcccgcccacatcatggtggagtatttctggctaccggtagaaccggcgcgcataaagaaaaggatctcgccgagcttgcccgtttcttcaagggcttcgtagttacacttcgcccacagcgcaggccaggcgttatgcataatttcggcactgacgccgttatgcaagtacgtgtcggtgggcagatactcgccgaagtcagccatccagccgccgcagccgagttcaatcatgttctttttgatcacttccttgaaccaggcgtaggcttctggattagtgagatcgacaacgccgccgtaaaactcgccaaactccaccagatagtcaccgccagaggcatcttttgccagatagccgtgttgtgccgcttcttcgcagagatctttatcgctggcaacatacgggttgatataggccaggaactgcacgccctcctgattccactgcttaatgcgactatccagttgcgggtagttttcgctgttccacttccagttccacatcacgcgtttgccaaaagaggtcatacgaataccggaccagtcctgcgcccagatgccgttgaccttcacgcccgcgttacgcatggtgtccagtttcttctggcacacttccgtcccgccctgaatgccgagcgttactccgtcataaatccagtcgggcagttctggctggcgtcccagcagggcggttaatttttccagcagggaaatgtatgtgtcagcacattcaaaacgcagcgttgctttgtcttcccacagcgccagttcatggtattccggggcactaaagtcgaagttcatatagcaactgttatcaacatggcagtaatacttctgcgtgctgacaaacgtaggctgtgggaagaaagtccagtaatagtcgccgcccgcattttctttgcagtcggcctgccaggtgacataggtttgtttgttgcgaccaacgccttgttcactggtccatagcgggaacggtttgccacgcagatcgaagtaggaaaactgttcgccgcagccgtagatatggtcctctggttgagcggcaaggcgcagccagatacggttgtggttaaggttgtcgttttgtagttccagcaataaacgcccctgatcgtcggcagagatattcagcgtggcgctaatgtcagaaccacggctgaaatgaattaaccaaccatccggactctggctgacgatggcgtcggtaagcgcaattttctcctgtagtttatctttaatgctgaaattaccgcggaacatatcgatatccgctataccactgccaatccataaacaaggattatctttgctatgggttaaaataagacgttgttgaaaatgtagggtaaaactgtcgttattctgatgaaattgaaaatctaataactgtggacgtggcgtatccataactaatctccatagagttgagaacgagattgttgccttcctgttattacaggcttatgtaaaatgattctcataaaactgatatataaaaactttacagaagctgagctgtttttaacttaataaattgaagatacataatgttgcctttagcgagtgaaatgttcttcaatgattttgactgctaatcaatacaagttattttctctgtccgtaaatattaaaaaacaggcggtgcggttttccactttccagtaataataagtcgataccactattaaaggcgttaggcgggcaactcataggttcaactgccagtccctgacgctgtaatttttcaccgctataaacctgcacccagagttgatcggaacaaaggcttacgctaagcgcctgctgtggatgggtaatggtcatttcccacaaatcattagcggttttaaaggtgtggtcgatttttgtcgcggctatttttttcgcctgcgtgaaatttaaatccagctcatcaacgtggtgaagcgttgtcggattcgcgtgctcatcgacggcataaacctggtttgccggaagctggaacagatattcatcaacagatgttaagttgcaggttaaataaggatgaatacccacgccataaggcgctgcgacagtgccgatattctggcttgcgatctcaacggaaagacccgtgtgtgcgttgaggctataaacaacttgactagccagcataaacggatagccgtaactgggcggcagaaaagctgtcagggtaacgctggtggcggttaattcactaatttgccagtctcgccaggcaagcagcccgtgaatagcggctttactactatgttcattaatgggtaactgatattcctgcccctgatagcggtaacagccgttggcgatccggttcggccacggaataagcactttacccagatgcgccagcggcatctcttcgggtttgtgcgggatgactaaatgacaaccctgaaaggttaattcagccagaccagcaccgacggtcacaatggtcgcgtgataatcccccgcggcaagactaacggtctgtccactgcaatgcatattggtgatttgcatacaaggcaccttaattaagctcatacagcctcccgtgaggctgatgtcaaacccaaaaactgcaccggacggtcccctcgcccctttggggagagggttagggagaggggaaaacccgcaccctattttcagatcagttatttcgcattaatatccagcagacccgctgcaaccgctggagccatgccgggcgctaacgggatacgcgggatcaccaggcaatgcagcaggtgataaatatcctgtttgccgtcccagactttggtggtgaccttattgtccgcatccagctcctgccaccaggaaccattttcatagtccatcaggtacttaatgcagtactcccaccatgtttgataccaggtttcatactggcgatcgccagtgacggtgtagagcgcgtaggccgtacccattgcttcgacgataggccaacgtacacgttcgcggaccaccggttttccttcccagtcaacggtataaacaatcccgtccgcgccatcgggtgcccaggcatcgcgcacggtggcgttaaacagacctttggcatcttctagcagccatgctggtggttgttcgcaacgggcttccagggcagcatggatgtgcagcattaaacggccccattcgatccagtggcctggtgtacctccgaacgcgcggaagcgatgcgccgggttatctttgttgtaatccggcagcggattccactgggtatcgaagtgttcgttaacgcgataatgattatttctggcgacgtcgtggataatcacggaagccacgcgaatcgcgcgatccagccattttttgtcgtgagtgacgtcataaacaatcaagaaagcttccaccgcgtgcatattggcattgccgccgcggtactcttcggttttgctgaaggcttcgtcccaggattccaggcacatctgctcttcttcgctccagaaatatttctcgataatttcaatggtgtaatcgagcagcttgcgcgcttccgggtgacccgttgtgacggcgctggcggcacccagcagagcaaagaagtgttgatagccctgtttggaggcatccaccacgccctcgtcattcacgcaggcataccagccgccatattttttatcacgcagtgcgccgttcatggctttgataccgtgatcaaccaagctgtaagcgccaggtcgacccatcgccgcagcaacggaataaacgtgcaacatacgagcggtgatccacagatgggtgcccatctcttctttgatttgccctttattgcctaaccagccaaaaccagtcggcactacggaatttttaccaaaatcaaagatgcggtcggtttcctgttccagccaacggttgtggcttagggtgttaaaccatttcattccttttatcctcatcttagcggcgtttagccatcatttcgtcgacgatatcgccaagttgttgtaatttcggtgcgcaaacgtcacgcagcatcagctcgttgtctggtaaaccgacgacgcttgcccagactgcacggcctgccaggaatccgcttgcgcccgccgtcattgccacgcgtacggcacgcgggaacagtttttcgtcgacaccggaagagaggatcacccatggcatattgatatggtcattcagacgttgactagcacagagaagctcttgttgcggacctttgccataaagcggcatttcaactttgtagaggtcagcgccactgtcgcccagctctttggcggcatcgatgatcgcttgttcgcgatcgaatttatcgccacgacgcggtgggcggacgactggctcaatgatgcttaccagaccgtgactgtggcacagttcgttgaactctttcaccatatccagacgttgctgcgcatcttcatcactacgccacagcaccagcagttttaaggctttgccaccgtcttgtttgatctgtagcggattgattttgcggtcaataaccacgctatcgaccggaataccgttgccaggaatgaactcatcggcggcgacaatcatggcgcaacttttggcaatcgcgttttgctcaaccacctggcggtagcagaattgttgatctaccagaatcgcgctggcataagggctgagggcctttgcagcgttaactttgaaatcagttaaaacgctatcggctaccggagcgggtgccccagccgcggcaaacatcatgcgcatggcttcgcgctgatcgaccgccagcatggcaaaaccgccgcttgcgcgcgtaatgtcgttgatggtgtacttattcattcatttattcctttatccagtcgttacatttttactttggcagtcatcccggcactgacacggacctgttccagaatggcggaccagtcctggcgaccgcgacccgctgcgcgcgcctggctataaacctcccgactggcggcccccagcggcattggcacatgcagctggttggcgacatcaagggcgatgccaagatccttatgggcaagatcgatcatgaaggcgggagaaagatctccgctgaggactttgtttggccaggaagtggtgaagtgacctttaccggcggcggtaccgctcatcactttgacggcaacatcgaagggaagattcagggcttcgcacaaaacggcggcttctgcgctaagcgcattgagcgcgatgctcatgtagttgttgatgagcttaacgcggatccccatgcccggaccgccagcgttgatcaactcactgcccatcgccatcaggatcggtgtggcacgttcaacttgttcagcggtgccgccagccagcagtaacagagtaccggtaatggcatttgcagaagtacggcctaccggaacatccatcatgctgaagcctttggcttgcatatcggcaatcaatttatcggtttgcagcggatggatggtggacatatcaatgaccagcgcatcggtagataagccttcgcaaacgccgttttcaccgaacaacacgttgcgcaccagatcgccattcggcaacatggtaatgataaattcggcatctttagcggcctgcgccgggttggcggcgggagtcgcacctttgtctaccagatgccgcacagcttcggcgttcacatcaaagacgcgaagttgatgcccttgctgcaataaattgctcgccattgggctacccatttgtcctaaaccgataaacgcgattgctgccataaccctctcctgaatacagttatgtcactttttgtcatttatgacatgctttgcttgtctgtttttgatcgtatttgtaatttatcgtcaaaaaattgacagccgtcactttttaaacaattggtgaaattaaaatgaacgcatcccaaaatgtttaaggaatgaccatgattcgtgttgcttgtgtaggtataaccgtgatggatcgcatctattacgtggaagggttaccgacggagagcggtaaatacgtggcgagaaattatacggaagttggtggcgggccagcggcgacggcagcggttgcggcggcaaggctgggggcgcaggtcgattttattggtcgcgtaggtgatgacgacacgggcaacagcctgctggcagagctggaatcctggggcgttaacacccgttacaccaaacggtataaccaggcgaaatctagccaatccgccatcatggtggataccaaaggcgagcggataatcattaactaccccagcccggatctgctgcctgacgcagagtggttggaggaaattgatttctctcagtgggatgttgtgctggcagatgtacgctggcacgacggcgctaaaaaagccttcaccctggcccgtcaggcgggtgtgatgaccgttctggacggggacattacgccgcaggatatcagtgagctggtggcattaagcgatcacgcggcctttagtgaaccgggtctggcgcgcttaacgggcgtgaaagagatggccagtgcgctaaaacaggcacaaacgctcacaaatggtcatgtctatgtgacccagggtagcgcaggctgcgactggctggaaaatggtgggcgtcagcatcaaccggccttcaaagttgatgtggtagataccacaggtgcgggtgatgtttttcacggcgctttggcggtggcgctggcaacaagtggggatttagcggagagtgtccgcttcgccagcggtgtagcggcgttaaaatgcacacgtcccggtggacgagccgggatccctgactgtgatcaaacccgatcttttttgagtctttttgtataaaatgccagggtgatggtttttcgaggaattttcatgagccttaccgaactaaccggtaacccgcggcacgaccaactcctcatgctgatcgccgagcgtgggtatatgaatattgatgagctggcaaatctgctggatgtctccacgcagacggtccgccgggatattcgtaaattaagcgagcaaggcctgattacgcgccatcacggtggcgcgggtcgggcttccagcgtcgttaatacggcgttcgagcagcgtgaggttagccaaaccgaggaaaaaaagcgattgccgaagcggtggcagactatattcctgatggtagtacaatatttatcaccattggtacgactgttgagcatgttgcccgggcgttacttaaccataatcatttgcggataatcaccaacagcctgcgtgtggcgcatattctttaccacaacccgcgctttgaagtgatggtgcccggcggtacgttgcgctctcataatagcgggatcattggccctagtgcggcgtcctttgtggctgattttcgtgctgattatctggtaacaagcgttggggcgattgagagcgatggcgcgttgatggagtttgatgtaaacgaagctaacgtggtgaaaacgatgatggcgcacgcgagaaatattctgctggtcgccgatcacactaagtatcatgctagcgcggcggttgaaattggtaacgtggcacaggtcactgcgctctttaccgacgagctgccgcccgctgcgctaaaaagtcgcttacaagacagccaaattgaaatcattcttccccaggaagacgcgtaaatttttgtgaccgttaacctggcttcataccttgccacatagccaaacccatcctttcccgctacagttaatttcttgtggcgcgaaaggaggcaaaaatgctctatatctttgatttaggtaatgtgattgtcgatatcgactttaaccgtgtgctgggagcctggagcgatttaacgcgtattccgctggcaagccttaagaagagttttcatatgggggaggcgtttcatcagcatgagcgtggggaaattagcgacgaagcgttcgcagaggcgctgtgtcatgagatggctctaccgctaagctacgagcagttctctcacggctggcaggcggtgtttgttgcgctgcgcccggaagtgatcgccatcatgcataaactgcgtgagcaggggcatcgcgtggtggtgctttccaataccaaccgcctgcataccaccttctggccggaagaatacccggaaattcgtgatgctgctgaccatatctatctgagccaagatctggggatgcgcaaacctgaagcacgaatttaccagcatgttttgcaggcggaaggttttagtcccagcgatacggtctttttcgacgataacgccgataatatagaaggagccaatcagctgggcattaccagtattctggtgaaagataaaaccaccatcccggactatttcgcgaaggtgttatgctaaaaaccattcaggacaaagccaggcaccgtacccgtccactatgggcctggctaaaactactctggcaacgcattgatgaggacaacatgacaaccctggcaggtaaccttgcctatgtgagcttgctcagtttagtgccgctggttgccgttgtttttgcgcttttcgccgcttttcccatgttttccgacgtcagcattcagttacgtcactttatttttgccaactttctgcctgctactggcgatgttattcagcggtatatcgaacaatttgttgccaattccaacaagatgaccgccgttggggcgtgcgggctgatcgtcaccgcgttattgttgatgtactccatcgatagcgcgttgaataccatctggcgcagtaaacgagcgcgaccaaaaatttacagcttcgccgtgtactggatgattttaacgctggggccgctgctggcaggggccagtctggcgatcagttcctatttgctctccctgcgctgggcgagcgatctcaatactgtcatcgacaacgtgctgcgtatttttccgttgctgttgagctggatctccttctggttgctgtacagcattgttcctaccatccgcgtacctaaccgcgacgcgattgtcggcgcgtttgtcgccgcactcctgttcgaagcaggaaagaaaggtttcgcgctttatatcaccatgttcccgagttatcagctcatttatggtgtgctggcggtgatccccattctctttgtttgggtctactggacatggtgtatcgtcttgcttggcgcggaaattactgtcactctcggggaataccgcaaactaaaacaagcagctgaacaagaagaagacgacgaaccatgattgcattaattcaacgcgtaacccgtgccagcgtcaccgtggagggagaagtgacgggcgaaattggcgcgggacttttggtgttattgggtgtcgaaaaggatgacgacgaacagaaagcaaaccgtctgtgcgagcgtgtgctcggctaccgcatctttagcgatgccgaaggcaagatgaatctcaacgtgcaacaggcgggcggcagtgtgctggtggtttcccagtttaccctcgccgcagataccgaacgggggatgcgcccaagtttctccaaaggtgcaagtccggatcgcgcagaggcgttatatgactatttcgtcgaacgctgccgtcagcaagagatgaacacgcaaacaggacgcttcgctgcggatatgcaggtaagcctggtcaatgatggccccgtgacattctggttgcaggtatgagccagcttccagggttgagtcgggaaacaagagagagtatcgctatgtatcaccttcgggttccacaaacagaagaagaattagagcgttactatcagtttcgctgggaaatgttgcgtaagcccctgcatcaaccaaaaggtagcgaacgcgacgcgtgggatgcgatggcgcatcaccagatggtcgtcgacgagcagggtaatctggtggcggtaggccgactgtatattaatgccgacaatgaagcgtccattcgctttatggccgttcatcccgacgtgcaggacaaagggttaggcacgctgatggcgatgaccctggagagcgtggcgcgtcaggaaggcgttaagcgcgtgacctgtagcgcccgtgaagacgcggtggagtttttcgccaagctggggtttgttaatcagggagaaatcaccacgccaaccaccacgccgattcgccattttttgatgattaagcccgtcgccactctggatgacattctgcatcgcggcgactggtgcgcgcagctgcaacaggcgtggtacgaacatatcccgcttagtgaaaaaatgggcgtgcgcattcagcaatataccgggcaaaaatttatcactaccatgccagaaaccggcaatcagaatccgcaccatacgctgtttgccgggagtttattcagtctggcgacgctcactggttggggacttatctggctgatgctgcgtgaacgccacctcggcggaacgattattcttgcggatgcgcatatccgctacagcaagccgattagcggtaaacctcatgcggtagccgacctcggtgccttaagcggcgatctcgaccgtctggcgcgcggacgaaaagcacgggtgcagatgcaggtcgaaatctttggcgacgagacgccgggtgcagtgtttgaaggcacgtatatcgttctgcccgcgaagccatttggcccgtatgaagagggcgggaacgaagaagagtaactgatggagaggggcggtgctgcctctctcattcaggtcatttatattagtccttggctatttcggttatattaaataagaactctataaatttttattcttcgttggctccatacgtgtcttgctacatcactgttcaggagcatttaaatattatttgtagaactgagtggcaattatcgcagataatgcttaattcatcatcttagttcatgtttgagcgatttttgatagtcaaaaccccctctggtgccatacttttctcataaatatttttaaaatctatagctaacaaatattatgcaaagataatggactagcatcattgtcagtatcattcatttactgctctgtatgttatgaataattatgttgtatgtttgctcttaaaccgtgggaaggaggctataatggttgccaatattaatctcattaaacaagaaagttattctgttgttaatttagaaaaacaactttcccgaactgttaccaacaaaattataacgatgagcaagtaaagaccggttggtggcagtactgaccggtctgtgatgaaagattaatttcaccttaaatcctggtgctgttaggatgctgacgtttttcggctacaccattcagattatgcaaataaatatctctgaatataatatattcatagcacccataattcatcctgggcgataactaaaccatttttgagtaataaatgaaacaactgcaacactcttattatttctggaaaacgcctcgcaaaaacaaaacaacatgcaaaaatccgctttttttaaatgattttccggcgtaattttcgcacatacattaatgagtaatatatgtaaggtattggtaatggcgatgaatacggtttttcttcatttaagtgaagaggcaattaaacggctgaacaagcttcggggctggcgtaaggttagtcgatctgcaattttacgcgaagcggtagagcaatatctggaacgtcagcaattcccggtgcgtaaagcaaagggaggcaggcaaaagggggaggtagttggtgttgatgatcagtgtaaggagcataaggaatgacaaaaatttttcattcttgaatataaaaaacagatgcccttattctggtattaatacaaggctgttttacttgaacttataataactgcaactgttacatcatatctggaaaacgcctcgcaaaaataaaaaatgatgcgtaaatgagctttctttaaagattcggcaagggtacttttctctccatagattcaaaaatgatattggcgagatatttatgaactctctggcaggtatagatatgggcagaattttactcgatttaagcaatgaggtgattaagcaacttgatgatctcgaggtgcagcgtaatcttcctcgtgcggacctattaagggaagcggtagatcaatacctgataaatcaaagccaaacagcaagaaccagtgttcctggcatctggcaagggtgtgaggaagatggtgtcgaatatcagcgtaagctgcgcgaggaatggtaatgggaaaaaatgatgtcaatcagattgctgacaacgtgcgcgttgttcatgccggatgcggcgtgaacgccttatccggcctacaaagtcgtataaattcaatgtattgcagtttattggtaggcctgataagcgcagcgcatcaggcaatcttacgcttgtcatcagtctcatgcccataaccttattgatgtggtggtgggtaaattgaggccaaaccggcactggcggcatagcttgaggtggtaacgcggaatacgagagatggtgtcgtcacaccctatgagctgtaatccgggcgacctgcgccacccggaaaacgtcagagattactctccttcacccggaaacaggaacgggttgatggaactgcgggcatagccttcttgctccattcgtgcgtccagtaccagagaggcgaggtcatctgctacggcttcgatttttggatctttttcctgatagagaattttcaggtaagtgtcgcagtcatcgcagctttcggctttaatcgcggcctgttcgtcatccaggctccagtaatgcagtttgccgctctgctcgcagttgctgcattttacgcgcactacgtgccattcagtttcacacaggttgcagtgcaggtaacgtagcccctgagtggtgccaatttgcaccatgctggacaccggcatagaaccacaaaccgggcaatattgacgttgctcgccgtattcagcgcgggctttgccggggatcagattggccatctgcgcccagtagaggctcagtgcagcccagataaacggcgctttatcgctgctgacggagctgaaatcagaggcaaacagcgcgctggccatatcttccagctcctgagtgcttgccttctccagattctcaatcactgccagcgccgggccgctcatttcaggtttcagctcagcaatcagcgccatcagcagcttttgccagtgcttatcacgcggcagaacgtgaatatccagcgggggcttgccttgtgcgctggcttctttaatgcgcgcagtcagatccatctccagcggatggtcgtacagcaccacttcctgggcgtgggcgataagcgcagcaaagcgcaggtaatcacccagaggattattttctgccagctcgcgcagacgctcggcgcggcggttgtataaattcttgagccgagggaacaataacggcggaatcatatccgccgtacgtttctcgctactacccagctcatcttgcgggattatgcgaatactcattcagctttcttttccgttgtcttgcggacctcacggtaccagcgcgggtgatgtttcttcgcccaggcgctggtaacccatccttccaccatggcggtaatcgtgcctttcacccaaagggcggcgtagatatgcaccatgataaccacaattaacgccactgcggcaaaactatgcagcattaacgcgaatcggatcaccgggatactgaaagcaggcgcaaaataaggacgccagataatcacgccgctcaccagcagcagaaccaggaaaataatcgccgcccagaaaacgcatttctgaccgaagttataacgcccggtgtcacctacttcctcgttgacgacgatcttacgaatattcttcgcccaaaagatatcatcccgattgattaggttgtgatgccagtaacggaaaaacatgatgatgaagctggcaaacataaccacgccgacaaacgggtgcagaattcgcgccagctgcggtgtgcccatgatttgcatcaaccagttgaaggacgggaacaaaaagcccagcccgctcaccgccgccaggatgaagcagaaggcggtgatccagtggttgatacgttccggcgcggtgtagcgcacgatggtgtcacgtcgtttcatttgcgctcctcgtctttctcttcgtgcagattattctcttcctcatccgcacggttcggaccgacacccacgtagtggaagatactggccgcaaaggtagccgcaaagccaacagccgcgagcggtttccagatgcctttccagaatttcacggtttcgctgatttccgggttctccggcaagccatgatacagatttggcttgtcagcatggtgcagcacgtacatgacgtgtgtaccaccgacgcctgccggatcgtacagacccgcattgtcgtaaccgcgggttttcagctcagcaacgcgctcgctcgccagcgttttcatgctctctttcgtaccgaagtgaatcgcgcccgttgggcaggtcttcacgcaggctggttcttgcccaaccaccacgcggtcaacgcacagcgtacatttgtagacgcggttgtcttccgggttgaggcgcggaatgtcgaacggacagcccgcaatgcaataaccgcagccaatgcactgctcggactggaagtcgacgataccgttggcatactgaataattgcaccttccgccgggcacgctttcaggcagcctggatcggaacagtgcatacagccgtctttgcggatcagccattccagtttgtcgttctgctccacttcgctgaagcgcattaccgtccagcttttggcgcttaaatcattggggttgtcgtacaccccaatgttattgccgacggtatcgcgaatgtcgttccactcactacacgccacctgacaggctttacagccgatacaggtggtaacgtcgatgagtttcgccacttcttcctggaagtcccgcgcctgaggcgcgggggtcagaccgttagtcgcggaacgacgaatgatatcttgagattgataagccatatgtcgtctccgttacaccttttccacattcacaaggaaggacttaaactccggcgtctgcgtgttcgcatcaccaacgaatggcgttaaagtattggcaataaagccttttttagctacgccttcatagccccagtgaatcggaataccgatggtatcgatatctttgccgttcgctttcagcgtgcgaatacgtttggtcaccaccgctttggctttgatatagccacggttggaggagactttcacggtatcgccctgggcaatgccaagtttattcgccaggctctccccgatttccacaaactgctctggctgcaaaatcgcgttcaacagcgcgtgtttggtccagtagtggaagtgctcggtcagacgataggtggttccgacatacgggaacttatcggctttacccaatgcttcggcgtcgtctttaaagatacgtgcagccgggttgctgataacgtttggatgcagcgggttagttcccagcggcgtttcaaacggctcgtagtgttccgggaacggaccttccgccatcttatcgagggcaaacagacgccccatgccttcctgctgcatgataaacggcccgacgccgctacccggaggcgctgcgctgtagtccggaatatcccagccggtccacttagtgccgtcccatttcagcaactgacgcttcggatcccacgggttaccctgcggatctgcggaggcgcggttatacagaatgcggcggttaagcggccatgcccatgcccagcccagcgtgttaccgaggccagacggatcggcgttatcacggcgtgccatctggttgccttccggcgtccagctaccggcgaaaatccagcagccacaggaggttgtaccgtcatcgcgcaattgggcgaagctactaagttgttggcctttcttgacgataaccgcaccggttgccggatcggtaatatcggccagcgccttaccgttgctctccatcgccacttcttcactagatggctcatgcggaatggcgtagttccatgtcatgttcagcacctggtccgggttcgcgccaccctgttcggcatacatcttgcgcaagcgcaggaagataccggagaggatctcgccgtcagtcagcgcaatccccggggcgtccgcacctttccagtgccactgtaaccagcgaccactgttaacgatagaaccgttctcttccgcgaagcaggtgcttggcagacggaacacttcggtctggatcttgctgctgtcaacttcgttcagctcaccgtggttctgccagaagttagaggtttcagtgttcagtgggtcgatggtgacgaggaacttcagtttgctcagacaaccgatcactttgtttttgttcgggaaactggcaacagggttaaagccctggcagatatagccattgaccttgccctctttcatcatctcgaagtattgcaggacgtcgtagcctttatcccacttcggcaaccagtcaaagccccagctattttccgccgtcgctttatcaccaaagaaggccttcatcatagagacgaagaatttcgggtagttgccccagtagtttacctggccttccagcagcggttttggcgtgttggcggtaaggtaggtttgcagatcggtctgcttctcgcttggcagcgtcatgtaacctggcaggctctggctcagcagccccaggtccgtcagcccctgaatattggagtgaccgcgcagggcgttaacgccgccgcctgccatccccatattgccgagcagcagctggatcatcgccatcgtacgaatgttttgcgcaccaacggagtgttgcgtccagccgagggcatacaggaagctggcagttttatcgtgagcactggtttctgcgatgtattcgcagactttcaggaacgcgtcttttggcgtaccacagatgttttcaaccacatctggcgtgtagcgggaaacgtgctgtttcagcaagttccacacgcagcgcggatgttgcagcgtggtatcgcgtttggcgaagccgttttcgtccagttcataagtccaggaggatttatcgtacttgcgtttttccgcgtcgtagccggtgaacaggccatcttcaaagccgtaatcctcacgcacgatcaggctggcgttggtataggcttcggtgtattcgcggttgaatttttcattgttcagcaggtacagcaatacgccactcaggaaagcaatgtcagtaccggaacgaataggggcatagtagtcagctaccgccgccgtacgcgtaaagcgaggatcgatcacaatcagcttcgcgccgttgtgaattttggcttccatcgcccagcggaacccgaccgggtgagcttcagcggcgttaccgcccatcaccacgacgaggttggcgttcttgatgtcgacccagtggttggtcatcgcaccgcgaccaaatgttggagcaagacttgctaccgttggtccgtgtcagacacgcgcctggttgtcgaccgcgagcatacccagcgcgcgggagaatttttgcgttaaatagccggtttcgttactgctcgcggaagcacacagcatcccggtggagagccagcggttaacagtcacgccttcggcgttttgcgcaatgtagttagcatcgcggtcttctttcatcagtttggcgatgcgatcaaacgcctcttcccaactgatttgctgccatttatcagaacctggcgcacggtattccggaaacttcagacggctttcggagtggatgaaatccaccaggccagcgcctttcggacaaagtgcaccgcggttgaccgggtgatccggatcgccttcgatatggaagatagatgctttggcgttttttgctccgtcaccgaggctgtacatcaacagcccacagcctacggaacaataggtgcaggtattacgggtttcgcgggtgcgcagcagtttatactgccgggtttccgcgagtgctacgctgggtgcaaaacccagtgccgctgccgtggtgcctgccataccgccagcgcagatcttaaagaactgccttctgctgacctgcatggattgctccttgtttcgacattgtcacgtcccatttacattcgcttgctgcgtgtgcagggagtgggagttatttttctttgcggaaggggccgcaaaggtccagaattggctcaatttccctccatccaggaagggtttgtaacagaataccataatgttggtgtgtgtgttcttatctggttaagagaaagtgaaaaaaacacagcgaaaagaaatcgaaaatgtgacaaatatcacaggtgttcgtcaaattgagttatggcggcgtgatgatttacaacacccacggttagatgaggtcgcggaagaagttcccgttgcgctggtctacaacggcattagccatgtggtgatgatggcgagccccaaagaccttgagtactttgcgctcggttttagcctttccgaggggattatcgaaagtccgcgcgatatcttcggcatggatgtcgttccttcctgtaatggtcttgaagtacaaattgagctttccagccgccgctttatggggttgaaggagcgccgccgggcgctggcgggacgtacgggctgtggcgtatgcggcgtggagcaacttaatgacatcggaaaaccggtgcagccgctaccgttcacccagacgtttgatctcaacaaactggatgatgcattacgtcatctcaacgattttcagccagtggggcaactgactggttgtactcacgccgctgcctggatgttgccatctggcgaactggtcggcgggcatgaagacgtgggtcgccatgtggcgctggacaaactgttaggccgccggagtcaagaaggggaaagctggcagcaaggtgcggtactggtttccagtcgtgccagttatgaaatggtgcaaaagagcgcgatgtgcggcgtagagattttgtttgcggtgtctgccgcgaccacgcttgctgtagaagtggctgagcgctgtaatctgacactggtaggtttttgtaaaccgggtcgggcaacggtttatacccatccgcagcgtttgagcaattaattaaaataagtcctgcgaaatatattaaattgcaggacttattcatttcgtgaattttattattttatttataaacaaaatgcgtgtagtggcgttttcttttttcatttattatgttcactctcttatctatatatttataaggcaattaaatgaaaaggaatttattatcttccgctattatagtcgccatcatgtccctcggtctgacgggttgtgatgataaaaaagccgaaacagaaacgctcccgcctgccaatagtcaacctgccgcaccagctcctgaagcgaaacctactgaagctcccgttgcaaaagcagaagctaaacctgaaacacctgcgcaaccggtggtcgatgaacaagcggttttcgacgaaaaaatggatgtctatatcaagtgctacaacaagttacagatcccggtacagcgcagtctggcgcgttatgctgactggctgaaagattttaaacaggggcctaccggtgaagagcgtactgtttatggcatctacggcattagtgaatccaacctcgctgagtgtgaaaaaggcgtaaaaagtgctgtggcgttaacgcctgcgctgcaaccaattgatggcgtggcggtgagttatatcgatgctgccgtggcgttgggtaataccattaacgaaatggataaatattacacccaggaaaattataaagacgatgcgtttgcgaaagggaaaacgctgcaccagacattcttaaaaaatctggaagcctttgaacctgtagccgaatcttatcatgcggcgattcaggaaattaatgataagcgtcagcttgcggaactgaaaaatattgaagaaagagaagggaaaacattccactactactctctggcagtcatgattagtgcgaaacaaattaataacctgataagccaagataagtttgatgcagaagcggcaatgaagaaagtgtctgaactggaaacgctagtggcgcaggccaaagaagcggataaaggcggcatgaatttcagctttattaatagcgcaggccagtatcaactcgaggctaaaaaatacgttcgccgcatcagagataaagtcccgtactctgactgggataaagagcaacttcaggacgcaaacagtagctggatggtcgaagactctttcccgagagcattacgcgagtacaacgaaatggttgatgactataatagcctgcgttaaacgtttttgatgataaatgcagtgtcggatgcggcgcatccgacacagttcaccccttgtgaagtaactccataaatgcctcatatcctgttaacccggcaataatctccgccggatgctgacacaatatgcttgccagatagctaaatatttttagctcatgacgcgcatcggcggcggcgcaggcgatcaagacatggttaatgacttcgttattcacctcaactggttgggcgagggtaataaaaaatccacgaaaacgtcgctcctgttcgctccagcaatgtgggatggcgaggcgattaacaatcaggttttcaccttcgccttcgcgggcgatgatgcgttgtgcttcatcggcggtaatatggtgttgtgcgactaattgcgcacaaatttgccgggtaatatgttgccagctttcaccgcgtacattgctataatgaaaacttccgggggcagagaaaaaacgctccggctgttggcgaataaatgccgtcgccagaaaatgttttatttgttcgataccggcagccgtaatgatattttttacggtgatgtaattatttaccgcgtcatccagtaaataatggctgttgttaatgatcaataacggctcaatctcttcgcgaatggcaacaagttcgcttaagctacgggcaataattacccgacaatttaaaacatcgcgctcaatggcgagctgattaatagtggcaatcgcgttctggtcgctgagcaaaatgatcggctggcgttcgttttgatgccgctccagcgcacaggcaaaatacaaaccgatcagatcgctgtcgaaaaggggaatatcgagctgttcacgcagtagcgtaataaagtgcagactcatatcaaaggccgcaggccaggcggctttcaggttattcatgctgctctggcggtgctcagcaatccacactggtgcggcaaggcaacgtaataaatgcccggtaatattctcaaccagctgcgcatcaataatattcaaactcgcgatgcccggcaccctttgcagcaacccctgcacattatcggcactaattacctgcgcttgctgatgctgtttctctatcaaacccgtcagggttcttacagcgttatcaccaagaaacagaccgctatgttcaacgatttgttttatctcgtcaccgggatattgcggccactcatcggtcagttgattacgcagggcgtaaatcgccagaatcaggctggagagataatcaccctgcatgagcggccagcggtgttggttgtcgcaggccgtggataaatgctgaaggttgtctcgtgttatgcccgccagcggaattaaaaacggatctttgcgcagcaagttcgccagcaagataacgcgtttctcttctgtctcatcaatgaaatggcccaaaccagggcggctggccaggcaacaagtgcgttcataacgctgttttaaccggggcagacgctctgctacccacgtttctggcaaattaagcgcgctggcgagttgcgcacggggagtgaaagtattcagtaataacagcgccagcagccgatcgtcgttatcgtgcttttgcagcaactgaaaaaagctgcggcgctcgaagatttccagctgatagcccgcactgccactggcgaaaatgcgggctttgccgttaagggtgaagttgagatagtcaatatcacgcaggatggtcctgccactaacgccagtctgttgcgccagctcgccaggcgtgcgcggctgttgctccagcagatcgacaatctttaactggcgttcgtttagcattaatccacctgacggaactggctaaacgcgttgactttctccgcagttaaggtcgtcagaaaaccccgtatcagcgtgagcagagcttcgtaatcggctttactaatcataccgctgttggcgtgcagataacgagttggcagacacagcgcgacaaccggacgcccgccgcccatcacgttgtagcgcccgccatccgtcgcaccggttttcatggtggaaaattgcagcggtaaatcgttatgtgcggcacagctttttaacgctgctaccagtttctggttggggaagtagcgcttgtcaaacagcatcagccccggcccctggcccagtttcagcgggtatttaatgttatcaatgcccggaacatcgcccgctacggcggtatccaacacgatcacgacgtccggtttaatgtgttccgcgctggtttgcgccccgcgtagcccaacttcttcttccacactgccaacgccatacagcgtaatttcgggattattcaccgtctgcaatagttcagccatcattgcgcagccgatgcggttatccaacgccttgccgaccactttatcttcgccccagcaggcaaaattggcttccgggctaataaaattaccaatttccacgccgcgcttttccacctcttcgcgactgttcgcgccaatatcaatgaacatctcatcaaaactcagcggttgttgcttttgcttttccgttaacgcatgaggcgcgacggaaccaatcacaccagggattttcactcccttgtgtgtgcgtatggttacccggtggttgagcatgctctgattccaccagccgccaatggtggtaaaacgcagaaaaccgctctcgtcgatgtgggtgaccataaagccgacttcatccatatgtccgacaacggcaacttttggacctttattccccttacgggcaacaaagctgcccagaccatcgaaggtgatttcattcacgcaaggttccagcgtgtttatcagaatgtcgcgaacttcctgttcatcgccgctgacggcgctggcttcgcacaactgttgcagtaactcaatgttcatggacaagctcctgttgcgcggctttcgctttgcggcgtaaccacaatcctttcaggacgataatgaaactaatgttcagcgcgaggccaatcgccagcaccagataaaagctacccaccgggctcatcaggccgatcagcgggtcaaagatacccaaaccaggtgccagacgtttgattccgaaagcgatcaccagcacgccggtaatgccgcccgccagcgtattggcggtaatcatcggcaacggagctgccagagcgtaaggaatagccggttcggttgcgactgtggcaccgaccacaatggcactactggcagcctctttttcctgtcgggtaaacagtttgggcgcaatgaacgtcgcaagacccgccgcgacgggcggcatcagcgcgacaacgccgacgatggcgtaccagtcataaatgtgtttttccagcagactgaagcagaagaaccaggcggttttattgatggggccgcccatatcgaacgccagcatcgcaccgaccagaaacgctgccgcaaacttcatacttggaggaatggtattcaggaagtggagcagcccgcccatgaggtcggacatcaccggcccgataacgtagtaagtgagcacgccgaaaaccagcagagtaacgaacgggatcagcatactaccgagcagcggttgtaatgctttgccaaggcgcactttgcggaaccagaagacgaaatagccaatcgccagccccagcaccaccgcgccgaggaatcccgcaccgctctgggtgccgagcagcgctttgtcgttcgccagatagcaaaccagaaacgccggagcgaaagccggtttatcggcaatgctgctggcaatataagcgcccatgatggggatcataaaggtgaagccaaggtaaccgatggattcaactacccaggtaaagctcggcgcgcctttgctcatatcggtatacggcaaaccgaactgcaccagcatgttggcaagcgccaccaggataccaccgccgatgacaaacggcagcgccgcagagacgcccgccatcaggtggctcatcacgctaccgctttgcacttcctgtttgccaagcttcacgccgctatctgcggcaaaaagctggctgtttgtcggtaattcgctgaaaatctggtcgatatttttcaacgcctgggagatggcaatctcataaactttcttcccggcaaaccgcgcgcgatcatcaccgctcaggccacgcccggtagcgagaatgacgtaatcggcagcggcaatctcttcgctggataagcggttttcaacgccactggacccttgagtttccacttttatggtatgaccgagagaacgggctttctgttccagggcttccgccaccatgtaggtgtgagcgatcccggcggggcagttggtgatcgcgacaatacgtaaggaactctccatcgccacttccttaactgctgagggtttgatttaacaaggcaagcacctggtcggtatcgccctgttgcagttgatgaataaattccttgtgaataattttgcgacacagtgtgccgatgattttgacctgatcctcttcgccgctttgcggcacgccgaggcagatccagcaattgacgtcttcgccatcgctggctttccagtcaatagcctgcgctttgcgggcgaataatacgaacggttgtttaacgcaggcgcttttaccgtgcggcacggcgacaccggaaccaaatccagtagagtgcattttttcgcgcagcagcagggtttgcaggaactggtgactgtcggtgataaaaccgttttgtaacgctattgtcgccaactgcttcagaacggaataagcgccattgccctgaatattcaggtcaatacagcttgcagtaagagctgccattaatcggactccataaaatatattttaatcaattgtaatggtggagcgattaagtgatgagaggcgatatgtcggtaaacaatgacaatttgagacagagtgaaaggtcagatttgcggagtaatgcacataatggttatttaaataaaccacatgaatcattaatgggttattcattatttttgtgatttactcacaatgtatcagggaaatataacttaccgggagatgtaatatgtttaatttttcaaatcgaaatttaaaatattgtgccggaggcatctctggcacattgggcaattacggcaggtaaaacacttcttgcagctcgctactcaccgggctgttatccgggttagcgggcataacatcggtcatatatttccaccaacgttggcagacatcagtgctggcaaccgcattccagcgttcttcagattcaatctctaccatggcaaacagcagattacgcgctttgtcgagatagatggcgtagttatgcgcaccgtgagatttcagcactgcttccagttctggccagatgggattatgccgacgctgatactcttcgtgggcgtcggggtttacctgcatgacaaaggctttgcggatcatgtttgctccttacagcgccagcgcactggcgagtggcgtaacgccgaaacgcttgccgagcgctatcaactcttcacggctgatggtctgtttcatgccgcccatgctataaaccttcactaatacttgtgcacttttttctgcggtgtcgattaaaccgaaggtttcatccagcgtcggtccgctgccgaagacgccgtggaagggccacaacaccaggctatgtttttgcatctcttgtgcggtcgcctggccgatttcgtccgtgccgggcaccatccacggcaaaatgccaacgccatccgggaataccaccagacactcggtgctgccttcccccagttggcgagtgaagaccgcggtgtcgttttcaagtacataggtgagggcgatcaggttggtggcgtggcagtgcatgatcacccgatctttgccgttggtggctttaatgcgctcgcagtgggaaaggaagtgagccggaagttcggaagtggggacggcttcgttggttaacccccaaagaatgtggtagcccgcgccgtcgctgtcgacttttacgatgcctaagttagccgcaggatcaagctggacgttacggaagaatttgccgctgccggtgacaataaacggtgtatttgccagtaaaggcatgggctggctgagcgggatatagcgcggttgttggtggaaattgtcgtgatatggtgcgatatcggcgtcatccaggcgtagcgtcaggttgccgccgttgcgctcatcccagcctttcagccaggcgtcggtggtggctttgatcattccctggacaaaccaggactgagtaatgttttgcatgttctgtgttcctgtaaattcggtgttgtcggatgcacgacccgtaggccggataaggcgctcgcgccgcatccggcaatcaatgcctgatgcgacgctgtcgcgtcttatcaggcctacaactattgccgacctgtaggcctgataaggcacttgtgccgcatccggcaatcaatgcctgatgcgacgctgtcgcgtcttatcaggcctacaactgttgccgacctgtaggccggataaggcacttgtgccgcatccggcaatcaatgcctgatgcgacgctgtcgcgtcttatcaggcctacaactattgccgacctgtaggccggataaggcacttgtgccgcatccggcaatcaatgcctgatgcgacgctgtcgcgtcttatcaggcctacaactgttgccgacccgtaggccggataaggcgctcgcgccgcatccggcagtgtttacccgcggcgactcaaaatttctttctcataagcccgcacgctctccagccattcgctacctgctggcgtatcgtgacgttggcaatacatttcccagaccgcctgccacggcaagcttttctgctcttccagcagtgccagacgcgcagtgtaatcgcccgccgcttccagcttgcgcagctcagcggtaggttccagcaacgcacgcagcagggcttttttcatattgcgtgtaccaatgacccacgcggcaatgcggttgatagaggcatcgaagaagtcaaggccgatatgcacccggtcaaacagatcgtgacgcacaatctcactggcaattgcctgggtttcatcatccagcagcactacgtgatcgctgtcccagcgaaccggacggctgacgtgcagcagcaactgcggcacatacagcatggcggcggaaatcttgtcggaaatcacttcagtcgggtggaagtgcccggcgtccaggcacagcgcagtctggcggctggtggcataccccatgtaaaactcattggagccaaccgtgtagctctctgcgccaatgccaaacaatttgctctcaacggcgtcgatatggtgcgcagggtttagcttctcgctgatcacctcatccagtgctgccagcagacgctgacgcggggcgagacggtcaacggtgatatctttcataccatccgggatccagatgttcatcacgcttggtgtgccgagttgctcgccaaaataggcgctaacgcgacggctggctttgcagtgatcaatccagaactggcgaatgctgtcgtcggcatgggaaagcgtaaagccatcggcgcttagcggatggctaaagcaggaggggttaaaatccagaccgagctgattggctttcgcccattcaacccagtttttgaagtgctctggtttgatctggtcgcggctgactggcgtatcactttccagatagatggcatgtaaattaagccgtttcggccccggaatcagccgcatagcctgttccagatcggcacgtagctcactggcattacgcgctttgcccggataattgcctgtggcctgaatccccccggtcaggctaccttccgggttttcaaaaccggaaacatcatcgccctgccagcagtgcatactaacgggtaaacgatcaagttggcgcagcgcctcctcgacatcaatccccaccgccgcgaaacgctgtttcgctagctcccaggcctgttccagttgagtggtcatgcgcaaagctcctttgtctgtcgtgtagagtgaatctgcgccacatagtgggcaatttcactgtcaggattaggggtaaaggtggtcagattcgcggtggtgctgacgacctgacggaaatcatccacattgttgagttcatccagcgtcattaactggatgccgatattgccgagcgtgctggcttcaacaggcccggcgatcacccgaataccgcaggcatcggcgcatagctggttgagcagcgtgttctggcagcctccgccgacaatatgcagttggctgaaatcttcaccgcgcagctgcgccagctcatgcaacacatcggcatacagcagcgccagactgtcgaaaatgcagcgcgccagttcagcatcactttccgggatcggttgcgccgtttcccgacacgcagcctgaatttcgctgcacatcgtctcaggattaataaagcgatcgtcattgggattgataatgaagcggcaagccggaagtgcctgtgtcgcggagataagcgccggaagatcgttgatttgctgctcctgaagcactcgctgaagcagccataagcccataatatttttcagcacccgatagcgaccttccgccccgccttcattggtgatgttggctgccagtgccgtgtcattggtaaatggcgtctggctttcgaagcccatcaaactccaggtgccagaagagagataagcagcacgactgccgtttaacgggctggcgataaccgcgctggcggtatcatggctggcaacggcgaccactggaatctcattaccctgcgggcaaatccagtgacctatgacattacccggatgcgtcgggcgaccaaaccaggctttgttggccccgctccacgccagtaggctctcgtcccagtcgtcgctattgatattgaccagttgcgtggtcgtggcgttggtatattcccagttcatcttgccggtcaggcgataactgaagtaatccggcatcagcagagcgtgagcaatgtgtggaataagttcaggttgttgctccgtcagcgcacgcaactgataaagcgtattgaagggcagaaactggatgccgctacgttgataaatatcgcgtttgccgagttgttgttgtgcctgcgccattaggccattggtgcggctatcgcgataagcaacgggcaggcccacacgctgaccctgttggtcgagcagcacaaagtccacgccccaggtatcaatcccaatgctatcgatacgaatcccttcctcgcacaccttgtttaatccaaggcgaatggcactttcaaggctatccacatcccaggtgacatagccgttctgactatgcagcccattgttaaaacgatggatttcgcgcagcgtcaggctgcggcattcacgctcgtaacgcgccagcatcacgcgcccactggatgcgccgagatcgacggcgacacaattgcgaaaggtcataatgtgatcctgctgaatttcattacgaccagtctaaaaagcgcctgaattcgcgaccttctcgttactgacaggaaaatgggccattggcaaccagggaaagatgaacgtgatgatgttcacaatttgctgaattgtggtgatgtgatgctcaccgcatttcctgaaaattcacgctgtatcttgaaaaatcgacgttttttacgtggttttccgtcgaaaatttaaggtaagaacctgacctcgtgattactatttcgccgtgttgacgacatcaggaggccagtatgaccgtattacatagtgtggatttttttccgtctggtaacgcgtccgtggcgatagaaccccggctcccgcaggcggattttcctgaacatcatcatgattttcatgaaattgtgattgtcgaacatggcacgggtattcatgtgtttaatgggcagccctataccatcaccggtggcacggtctgtttcgtacgcgatcatgatcggcatctgtatgaacataccgataatctgtgtctgaccaatgtgctgtatcgcagcccggatcgatttcagtttctcgccgggctgaatcagttgctgccacaagagctggatgggcagtatccgtctcactggcgcgttaaccacagcgtattgcagcaggtgcgacagctggttgcacagatggaacagcaggaaggggaaaatgatttacccagcaccgccagtcgcgagatcttgtttatgcaattactgctcttgctgcgtaaaagcagtttgcaggagaacctggaaaacagcgcaagtcgtctcaacttgcttctggcctggctggaggaccattttgccgatgaggtgaattgggatgccgtggcggatcaattttctcttagtctgcgtacgctacatcggcagcttaagcagcaaacgggactgacgcctcagcgatacctgaaccgcctgcgactgatgaaagcccgacatctgctacgccacagcgaggccagcgttactgacatcgcctatcgctgtggattcagcgacagtaaccactttagcacgctttttcgccgagagtttaactggagtccgcgtgatattcgccagggacgggatggctttctgcaataacgcgaatcttctcaacgtatttgtacgccatattgcgaataatcaacttcgttctctggccgaggtagccacggtggcgcatcagttaaaacttctcaaagatgatttttttgccagcgaccagcaggcagtcgctgtggctgaccgttatccgcaagatgtctttgctgaacatacacatgatttttgtgagctggtgattgtctggcgcggtaatggcctgcatgtactcaacgatcgcccttatcgcattacccgtggcgatctcttttacattcatgctgacgataaacactcctacgcttccgttaacgatctggttttgcagaatattatttattgcccggagcgtctgaagctgaatcttgactggcagggggcgattccgggatttaacgccagcgcagggcaaccacactggcgcttaggtagcatggggatggcgcaggcgcggcaggttatcggtcagcttgagcatgaaagtagtcagcatgtgccgtttgctaacgaaatggctgagttgctgttcgggcagttggtgatgttgctgaatcgccatcgttacaccagtgatagcttgccgccaacatccagcgaaacgttgctggataagctgattacccggctggcggctagcctgaaaagtccctttgcgctggataaattttgtgatgaggcaagctgcagtgagcgcgttttgcgtcagcaatttcgccagcagactggaatgaccatcaatcaatatctgcgacaggtcagagtgtgtcatgcgcaatatcttctccagcatagccgcctgttaatcagtgatattagcaccgaatgtggctttgaagatagtaactattttagcgtggtgtttacccgggaaaccgggatgacgcccagccagtggcgtcatctcaatagccagaaagattaattcgccatgccgatgccgacgatgttagcggcgacaataatcaccacacaaccgaggctcaacaccgttaccggacggcgtcctgcattgttccactctttcagcaccagcccgacgataccgccgcacaatacatagaaactcatatgcagcatccaactgatgtagtcatactgcgccggaatgcgggcgtggccccaggcatagaaaaagaattgcagataccacatcaacccgcccagtgtgctgagtaacacattgtgaatgatcaggctttttgccaggctgaagtcggcttttaggctcaaatccttcacttttgccagacgaataaaacagaaaccgaggttaatgatcgcgccgccgcccatgatgacaacatagcttggcagagcgacatacagtggatcgacgccaagtgcggcagcggcttcatgcatcggttttgcggcgttcatcgcaaaggacatcccggcagagaaaatgccgcacatcaccgccagcaccagcccttttttcagattgaactcttcggctttaatgcccatcttgcgctctttcaactgcccggcgcgagttacaatccctacgccaatcagcgccaccagaacgccgagcaacgtcatgcgtccgccttcggtgctaatcaacacatcgaaattgccgttgataattggcgtcatcagcgtaccgacaatcaacgtaatgccaatggcgatgccaattcccatgctcatgccgagataacgcatggtcaggccgtagttgatattaccgatcccccacatagcgccgaacagaaaaacaggcagtcgcgtagagagactaaagctgctgtaatacgcccagaaattcggtagtaacagggcgctgatggcccacggcagaataatccagctaacaatcccaccgacactccacatggtttcccaactccatttttttacttttttgaacggagcgtaaaaacaggctgcactggccgcgccgatcaaatgccaaaatatccccatcgtaatcgcgttactcatcttcttatcctcatcatttttcgtcgcgtcacatctccgacgagatgagtgtaaaaatcgtgctgtcgattaacctttcgcctgttgccgccgttgtcgatttactggcaatcacggcattaagtgggtgatttgcttcacatctcgggcattttcctgcaaaaccatacccttacgaaaagtacggcattgataatcattttcaatatcatttaattaactataatgaaccaactgcttacgcggcattaacaatcggccgcccgacaatactggagatgaatatgagctataccctgccatccctgccgtatgcttacgatgccctggaaccgcacttcgataagcagaccatggaaatccaccacaccaaacaccatcagacctacgtaaacaacgccaacgcggcgctggaaagcctgccagaatttgccaacctgccggttgaagagctgatcaccaaactggaccagctgccagcagacaagaaaaccgtactgcgcaacaacgctggcggtcacgctaaccacagcctgttctggaaaggtctgaaaaaaggcaccaccctgcagggtgacctgaaagcggctatcgaacgtgacttcggctccgttgataacttcaaagcagaatttgaaaaagcggcagcttcccgctttggttccggctgggcatggctggtgctgaaaggcgataaactggcggtggtttctactgctaaccaggattctccgctgatgggtgaagctatttctggcgcttccggcttcccgattatgggcctggatgtgtgggaacatgcttactacctgaaattccagaaccgccgtccggactacattaaagagttctggaacgtggtgaactgggacgaagcagcggcacgttttgcggcgaaaaaataatcatttgccgcctgctgcaatgaggcgtataggccgcatatcagcttaaaaaatgaaccatcgccaacggcggtggtttttttgtgatcaatttcaaaataaaaacaatgatccgataaaaataaaacagcgtttcaattgatgtggttttgatcacttttattgattaaatgaatgtctatcttcgtttccatcaacactgatgctccattgaggaattacgcatcagcccttaaaaatatgccgacaggtgatggaaatgcagataaaacgcagcattgagaaaatcccggggggggatgatgctcgtcccgctattccttggcgcactgtgccacaccttcagcccgggggcggggaaatattttggaagtttcaccaacgggatgattaccggtacggtgcccattctggcggtgtggtttttttgcatgggggcgagtataaaattaagcgcgacgggaacggtactgcgtaaatccggtacgctggtggtaactaaaattgccgtcgcgtgggtggttgcggcaattgccagccgtattattccggaacatggtgttgaagttggattctttgccggacttagtacgctggcgctggtggcggcgatggatatgaccaatggcggactttacgcttccatcatgcagcagtacggcacaaaagaagaagctggggcatttgtgttgatgagcttggagtccgggccgctcatgacgatgattattctgggcactgccgggattgccagctttgaaccgcatgttttcgtcggcgcagtattaccgttcctggtgggctttgccctggggaaccttgaccctgaattgcgagaatttttcagcaaagcggtgcaaacgctgattccattctttgccttcgcgctgggcaataccattgatttgactgtgattgcccagactggtttgctggggatcctgttgggtgtggcagtaattatcgtgaccggtattccgttgattatcgccgataaattgattggcggtggcgatggcactgccggaattgccgcttccagttccgcaggggccgcggtagcgacacctgtgctgattgcagaaatggtgcctgcgtttaaaccgatggctccggcagcaactagcctggtagcgacggcggtcattgtgactagcattctggtgccaattcttacctctatctggagtcgtaaagtcaaagccagagcagcgaaaatcgaaattttaggtacggtgaaataaacctgcttccttaatccccacagccggatgaactaacgttcgtccggtttgctattgagttcctgcctggatacttaccgcgaaaacagcacgcctgacataaaataaatatggtctaatggggaaatttctcgtggagagggaacagatgcgatatccggttgatgtatacacaggcaagattcaggcttatcccgaaggcaaacccagcgcaattgctaaaatccaggttgatggtgagttgatgctgacggagctggggctggaaggtgacgagcaggcggagaaaaaggttcacggcgggccagacagagcgctgtgtcattatcctcgtgagcattatctctactgggcgcgggaatttccggaacaggcggagttgtttgttgcgcctgcgtttggtgaaaacctcagtaccgacggcctgacggaaagtaatgtttatatgggcgatattttccgctggggagaggcattaattcaggtcagccagccgcgcagcccttgctataaactcaattaccattttgatatcagcgatatagcgcagttgatgcaaaacacaggtaaggtggggtggttgtatagcgtgatagcgccagggaaagtgtctgcggacgcgccgctggagttggtttcccgtgtcagcgatgtgaccgtgcaggaggctgccgccatcgcatggcatatgccgtttgatgacgatcaatatcaccgtttactctccgctgccgggttaagcaaaagctggacgcggacgatgcaaaagcgccgactgagcggcaagatcgaagatttttcccgccggttgtggggaaaataacccccggagtgtaggcctgataagacgctatcagcgtcgcatcaggcatcctgctcaaatgccggatgcggcgtaaacgccttatcctgcctgcaaatgcgaagtttaactccgcttatacagcggcaaccaaatcaccagccgtaaaccgcccagcgggctgtcttctgccttcacccagccacgatgctgctgaatggcggtttcaacaatcgccagccccaaacctgtaccgccagattcacgatcgcgtgcttcatcggtacgatagaacggacggaaaatctgttcgcgatcttccgggctaacgccaggaccatcgtcgtccaccgtaatggtgataccgtctttatctaccgcaaagcccacttcaatcttcgtatgggaataacgcagagcattacgaacaatgttttccagcgcactttccagggcgttcggattgccgtacagcggccacggcccaggcgggaagttaactgtcaagctcttgcccatttgctcggcttcgaacgccgcgttatccagcacttcactccacaactggttggctttgatggtttcgctaaccagcgcgtttttttgctgattacgactcatcaccaacagatcgttgatcatgctgtccagacgttgcgcttcggtttcaatacgctccagttccttgctttcaccgctacgacggcgcagtaacgccgtacccagttgcagacgcgtcagcggggtgcgcagctcgtgagagatatcagaaagcagacgctgctgagaggtcatcatgcgctccagcgcggtgaccatctggttaaaactggcacctgcggcaaggaattcctgtggccccgcttccagttccgggtgctggcgtaagtttccctgggcaacttcatcggcagcgtttttcagcttacgcgccggttttgccagactccaggccaaccacaacagcagcggcgtactgaccaacatggtgacaatcagcagtaatagcgggcggtcaaacagtaagttaatgaaatcggattgagaactgctggccggacgaatcagataaagttggtaattatcttcgccatcacgcacggagaacggaccgaccagttccacgcggccatactttttcttctgcggatgatcggcgttatcggcctgaccaataaagttacgaatgatctgcatttcgctgcgttcagcgccgatcacgcggccttcggtggtcaccaataacaaacgctgtcctggcggtgcccacttatcaatcgcccggaacagacgccgccaccacattaaatcgttgggcggatcgttcgccagctccgcttcgacatgctgctcaatcatcagcccctgacgctgttcgctatccagaagctcggtcatctggcgactatcgagcttgggtaacatcaaaaccaacatcaacaccagcgccagcgtcagccagaagatggcgaagatgcgcgcggttaagctgcctatcatgaagcagaaaccatcagatattagctcaactagcagaaaccatcagatagccgcgaccacgcaaggttttaaaccacgggtgaccatctttacgatccggcagtttacgacgcaggttggaaatgtgcatatcaatagcgcggtcgaaaggcgtcaggcgtttgcccaacacttcctggcttaaatgttcacgggaaaccacctgacccagatgctgtgccagcaaatagagcagggtaaactcagtaccggttaactccagcgtttgcccgtcgaagctggcttcctgacggcctggattcagcactaaggcatcaacttccagtgtcggactaccgttgtcgttgttttgctgttgctcgctccagtggctacggcgcaggatcgcgcgaatacgtgccaccagctcacgatcattaaacggtttcgggagatagtcatctgcgcccagctcaaggccgagaacgcgatcaagttcactgccgcgcgccgtcaacataatgacaggcgtctggtgtgtctggcgaagtgcttttaatgtgtcgataccatttttcttcggcatcattacgtcaagcaaaagtaaatcaatgctgtcgtccagaagatcaagcgcctgttccccatcgtgggcaacaatcacgttgaagccttccatctcgagcagctcctttaatagggaagtcagctctcggtcatcatcaactaacaggattttattcattgtttaaatacctccgaggcagaaattacgtcatcagacgtcgctaatccatgactttacgttgttttacaccccctgacgcatgtttgcagcctgaatcgtaaactctctatcgttgaatcgcgacagaaagattttgggagcaaatgatgcgcatagttaccgctgccgtcatggccagtacgctggcagtcagtagtttaagccacgctgctgaagtcggtagtggcgataactggcatccgggtgaagaacttacgcagcgcagtacgcagagccatatgttcgacggcataagtttaaccgaacatcagcgtcagcagatgcgagatcttatgcaacaggcccggcacgaacagcctcctgttaatgttagcgaactggagacaatgcatcgccttgtcaccgcagaaaattttgatgaaaacgctgtgcgcgcacaggcagaaaaaatggcgaatgagcaaattgctcgtcaggttgagatggcaaaagtccgcaaccaaatgtatcgcctgttaacgccggagcagcaagcggttttaaacgagaaacatcaacaacgaatggagcagttgcgtgacgtgacgcaatggcaaaaaagtagtagcttgaagctattgagtagtagcaacagtcgttcccagtaataaaccctgttttccttgccatagacaccatccctgtcttcccccacatgctgtgggggtttttttatcctcaatttgcctgctgcttaatgcattgcagatgatttgcttccgttatactagcgtcagttgatagcgggagtatttatgaatcaatcttatggacggctggtcagtcgggcggcgattgctgcgacggcgatggctagcctgctattgctgattaaaatttttgcatggtggtataccgggagcgtgagtattctcgccgcgctggtggatagcctggtggatatcggcgcgagcttgacgaatttattggtggtgcgatattccctgcaacctgccgacgataatcacagctttggtcacggtaaagctgagtccctcgcggcgctggcgcaaagtatgtttatctccggtagcgcactattcctgtttttgacgggtattcaacatctgatatctccaacaccgatgacagatccaggcgtcggggttatcgtgacaattgtggcgctaatttgtacgattatccttgtcagctttcagcgttgggtggtgcggcggacgcaaagccaggcggtgcgggctgatatgctacattaccagtctgatgttatgatgaacggcgcaattctgctggcgctggggttgtcctggtacggctggcatcgcgccgatgctctgtttgcattgggaatcggcatctatattttatatagcgcgttacgcatgggatatgaggcggtacagagtttactggatcgcgcattgcctgatgaggaacggcaagaaattattgatatcgtgacttcctggccgggtgttagcggcgctcacgatcttcgcacgcggcagagtgggccgacccgctttattcagattcatttggaaatggaagactctctgcctttggttcaggcacatatggtggcggatcaggtagagcaggctattttacggcgttttccgggaagcgatgtaattatccatcaggacccctgttccgtcgtacccagggagggtaaacggtctatgcttagttaatcagtataaaagagagccagacccgcattttgtgtataaaataccgccatttggcctgacctgaatcaattcagcaggaagtgattgttatactatttgcacattcgttggatcacttcgatgtgcaagaagacttccggcaacagatttcattttgcattccaaagttcagaggtagtcatgattaagaaaatcggtgtgttgacaagcggcggtgatgcgccaggcatgaacgccgcaattcgcggggttgttcgttctgcgctgacagaaggtctggaagtaatgggtatttatgacggctatctgggtctgtatgaagaccgtatggtacagctagaccgttacagcgtgtctgacatgatcaaccgtggcggtacgttcctcggttctgcgcgtttcccggaattccgcgacgagaacatccgcgccgtggctatcgaaaacctgaaaaaacgtggtatcgacgcgctggtggttatcggcggtgacggttcctacatgggtgcaatgcgtctgaccgaaatgggcttcccgtgcatcggtctgccgggcactatcgacaacgacatcaaaggcactgactacactatcggtttcttcactgcgctgagcaccgttgtagaagcgatcgaccgtctgcgtgacacctcttcttctcaccagcgtatttccgtggtggaagtgatgggccgttattgtggagatctgacgttggctgcggccattgccggtggctgtgaattcgttgtggttccggaagttgaattcagccgtgaagacctggtaaacgaaatcaaagcgggtatcgcgaaaggtaaaaaacacgcgatcgtggcgattaccgaacatatgtgtgatgttgacgaactggcgcatttcatcgagaaagaaaccggtcgtgaaacccgcgcaactgtgctgggccacatccagcgcggtggttctccggtgccttacgaccgtattctggcttcccgtatgggcgcttacgctatcgatctgctgctggcaggttacggcggtcgttgtgtaggtatccagaacgaacagctggttcaccacgacatcatcgacgctatcgaaaacatgaagcgtccgttcaaaggtgactggctggactgcgcgaaaaaactgtattaatgatttcggaaaaaggcagattcctttaccctgaaaccgatgacagaagcaaaaatgcctgatgcgcttcgcttatcaggcctacatgaattctgcaatttattgaatttgcaaacttttgtaggccggataaggcgttcgcgccgcatccggcatggacaaagcgcactttgtcagcaatatgaggcggatttcttccgcctttttaatccctcaacatatacccgcaagttatagccaatctttttttattctttaatgtttggttaaccttctggcacgctttgctcatcacaacacaacataagagagtcgggcgatgaacaagtggggcgtagggttaacatttttgctggcggcaaccagcgttatggcaaaggatattcagcttcttaacgttagttatgatccaacgcgcgaattgtacgaacagtacaacaaggcattcagcgcccactggaaacagcaaactggtgataacgtggtgattcgtcagagtcacggtggcagtggtaaacaagcgacgagcgtaatcaacggtattgaagctgatgttgtcacgctggctctggcctatgacgtggacgcaattgcggaacgcgggcggattgataaagagtggatcaaacgtctgccggataactccgcaccgtacacttccaccattgttttcctggtacgtaagggaaatccgaagcagatccatgactggaacgatctgattaaaccgggtgttagcgtgatcacgcctaatccgaaaagctctggtggcgcgcgctggaactacctggcagcctggggctacgcgctgcatcacaacaacaacgatcaggcaaaagcacaggattttgttcgggcactgtataaaaacgtcgaagttctggattctggcgcgcgtggctccactaacacttttgtcgagcgcggaattggcgatgtactgattgcctgggaaaacgaagctctgctggcagcgaatgaactggggaaagataaattcgaaatcgtcacgccgagtgagtctatcctcgcagagccaaccgtgagcgtggtcgataaagtggtcgagaaaaaaggtactaaagaggtggcggaagcctacctgaaatatctctacagcccagaaggtcaggaaattgccgcgaaaaactactaccgtccgcgcgacgctgaggtggcgaaaaagtacgaaaatgcgtttccaaagctgaagttattcaccattgatgaagagttcggcggctggacgaaagcgcaaaaagagcattttgctaacggcggtacgttcgatcagatcagcaaacgctgatttccccaggataattatcaaacccggtggtttctcgcgaccgggttttttatttgtcacgattttgcgttacccttgcatctctttgaggtacagggaaaaaaagatgaaaaaagcgggtcttctttttttggtgatgatagttatcgccgttgtggctgccggtattggttactggaaattaaccggtgaagagagcgatacattacgtaagattgtccttgaggaatgtttgcccaatcagcagcaaaatcaaaatcctagcccatgtgcggaagtcaaacccaatgccggatacgtggttttaaaagatcttaatggcccactgcaatatctgttgatgccaacgtatcgtattaacggtactgaaagtcctttgttgaccgatcctagtacgccgaacttcttttggttggcttggcaggcgcgtgattttatgagcaaaaaatacggccagccggttcccgatcgcgcggtttctttggcgatcaactcccgcaccgggcgtacgcaaaaccattttcatattcatatctcttgtattcgtcctgatgtgcgcaaacagctggataacaatctggcgaacatcagcagccgctggttgccactgccaggtggtttgcgcgggcatgaatacctggcgcgtcgggtaacggaaagcgaactggtacaacgcagcccatttatgatgctggcagaagaagtacctgaggcgcgggaacatatgggacgctacgggctggcgatggtacggcagagtgataacagttttgtattgctggcgacacaacgaaatctactgacgcttaaccgtgctagtgccgaggaaattcaggatcatcagtgtgagattttgcgttaaggcgaagagttaaggaaagtaagtgccggatatgaaatccggcacctgtcagacttaagcctgtttagccgcttctgcagctttaacgattactgcgaaggcgtcagctttcagagaagcaccaccaaccagcgcgccgtcgatatccggctgagcaaacagttctgcagcgttagacgcgtttacagagccgccgtactgaatgatcacttgttcagcgatgttagcgtcaactttagcgatgtggtcacggatgaatttgtgaacagcctgtgcctgagccggagttgcagatttgccagtaccgattgcccatacaggttcgtaagcgataaccgcaccttcgaatgccgcagcaccctgagttttcagtaccgcgtcgatctgacgtgcgcaaacttcttcagttttgcccgcttcattttcagcttcggtttcaccgatgcacagaaccggagtcaggccctgctctttcagcaccgcgaattttttcgcgatcagttcgtcagattctttgtggtaagtacgacgttcagagtgaccgatgatgatgtactgtgcgccgatgtctttcagcatagcagcagaggtttcaccggtgaatgcgccggacaggttcaggtccacgttttgcgcacccagcatgatgtggctgccttcagcttcgcgcttcgccatatcgatatacatttccggtggtgcgattgcaaccgcacagccagcaacacctgccagctctttacgcaggttagaaaccagctcgtgaaccatgtggcggctgccgttcagtttccagttacccatcactaaaggatgtcgcattttaattctccacgcttataagcgaataaaggaagatggccgccccgcagggcagcaggtctgtgaaacagtatagagattcatcggcacaaaggctttgctttttgtcatttattcaaaccttcaaggctttcagatagcgccagcttaatcggttcaacagcgaaggtcagccccttttcgccgttgtccgcgacaacataacgcagtgcaccttctgtctcggtgtaataacgtttgtttttccccgccgttagtaggctctgcagttttttctggctttgtgttttggtcattaatggggtgagtgtgcggatcaccgctgccatgtattcctgagctttcgctttcgcggctttttgctctggcccctggatgggtagccaggtcatttgaatgcttttgatttttaaggtaccgcgctccagcgctgtagaagcatacaagttctcattaattttacttgcagcacgagtgagattggctttgtcgggactgctgtcgatggcacgaaattcgttcagtggcaggctgggattctggctgttaaagtcttctcgaaactggctgatggagagatcgaaagtaggggctccagccagcagataaggcgcggtcgttgccgtatctggtgtttgtgcatgcgcctctgttgtaacggttaatgcagaacataagagaaaaaacagcgtacaccctggcttcattgacagtaccttttgttatgactggctccgattaaaacgatatctgtcgcccttgtcaaaagggtagaatcctggaaaagacaaccatcaaggaacttacatgaccatacagcaatggttattcagttttaaagggcgtattggacgccgtgatttctggatttggataggcctgtggttcgcaggcatgctggtgcttttcagtctggcgggtaagaatctactcgatattcagaccgcggcgttttgccttgtgtgcttgctctggccaacagcggcagtaactgttaagcgcttgcatgatcgcgggcgttccggcgcatgggcatttctgatgattgtggcgtggatgctgctggcgggtaactgggcgattttaccgggtgtctggcaatgggcggtggggcgttttgtcccgacgttgattctggtgatgatgcttatcgatcttggtgcgtttgttggcacacaaggcgaaaataaatatggtaaagatactcaggatgtgaagtataaagccgacaataaaagtagtaattaacctttaatatatctcttactgctatttttttccgggattgttatttccacgatgcaaatgacaatacccggaaaatccttctgaactcttcaccttaagcaatatcaaaaaaaatggtaatccataagatcattacttgtttgttcttcccttaacggcgcattattcttaagtcgtaatcgacagagaggcgaatatacagaggtgccctatgaaagatgtcgtagataaatgcagtactaaaggatgtgcgattgatatcggtacggtgattgataacgacaactgtaccagtaagtttagccgcttttttgccacccgcgaagaagcagagtcttttatgaccaaactgaaagagcttgccgccgctacatcctctgcagatgaaggggccagcgtggcctataagattaaggatctggaggggcaagttgagcttgatgcggccttcactttcagttgccaggccgagatgattatttttgagttaagtctgcgtagcttagcttgatggagttgctttagaaggagttaaacatggcttataaacacattggcgtggcaatttccgggaatgaagaagatgccttactggtgaataaagccctggagctcgccagacataatgacgctcacctgacgttaattcatattgatgatggcttaagcgagttgtatccgggtatctacttccctgcaacagaagatattcttcaattgttgaagaataagagcgataacaagctgtataaactgacgaaaaatattcaatggccgaagacaaaactgcgtattgaacgcggagaaatgccggaaacactgctggaaattatgcaaaaagagcagtgcgacctccttgtctgtggtcatcatcacagttttatcaaccgtttgatgccggcatatcgcgggatgatcaataagatgagtgcggatttgctcatcgtgccgtttatcgataagtaaccgcttaccagtaatgctccgctgtcatatggcccggtcggcgacgtaaatgtttcgtcatctgccgggtctctttcagcaactgttgtgtatcgcgcaccatctgtggattgccgcacagcatcacatggctggtttctttattcatcggcaggccaatcgtgctttccagttccccactttcaattaatgccggtatccgtccggtgaggctccccgctgccgtttcccgactgaccaccgtctgaatgcgcagttttccttcgtagcgtttttccagttcctgcatcagtggcaaatagcttaagtcggcggcataacgtgcggcgtgcaccaggaccagatttttgaagcgatctaaatctttacctagttgcagaatgcttaaataagggccaatcgctgtaccggttgccagcatccatagcgtttcgcagtgcggcacttcatcgagcacaaagaatcctgccgcttcgctaaccacctgcacttcatcgcctggtttcagtgccgccagtcgtgggcttaatttgccatcggggacggtgaccaggtaaaactccagatcgggattatcggggctgtttacataggagtaggcgcgctggacgcgttcgccgtcgatttcaaggccaagcttggtaaattgcccggcggtaaacggaagcacgggggcgtgaacggtgagactaaacagggcgtcggtccagttctgcactttagtgactttgcctgttacccaatcagccatgtttttctcctgttttgattgacttgccttatcttcgttctccgaacaaaaaaattccagtcccgaaggactggaaggctcaatcgatcaaatcaatcagaggatgtgcacctgcatttccgggtctttgcgatccagatagtggatggactgaatgcggcgaatggtgcgactcttgccgcggatcagcagcgtttcggtagtcgcgatattgcctttgcggctaatgccttccagcagatcgcctttggtaataccggtggcagagaagatgacgttatcgctgcgcgccatatcgcccaggcgcaatactttaccggcttcgatgcccatcgctttgcagcgtgccagctcctgctcgccaatgcgacgattctcttcgttgtcgcctttgacgtcatgacgcgccagcagacgaccgttcatgtcgccatctaatgcgcggatcaccgccgcagaaactacgccttccggcgcgccaccaataccgtacagcacgtcaacttcgctgtctggcatacaggtgagaatactggccgcaacgtcgccgtccggaatagcaaatacgcgtacgccgagttgctgcatttcagcgataacggcatcgtggcgtggtttagccagaatcgttaccgtcagttcgctcaacggtttgccgagcgccgccgctacattgcgcaggttatccgccagcggcaggttcagatcaatggtgcctttggctcccggcccgacaatcagcttctccatatacatatccggcgcattgaggaagcagcctttatcgcctactgccagcaccgccagcgcgttagcctggcccatcgccgtcatgcgcgtgccttcaatcggatcaacagcaatatctaccgcgtcgccgcgaccagtaccgactttttcaccaatgtagagcatcggtgcttcgtcgatttcaccttcaccaatgacgatggtgccgtcaatgttgacctggttgagcataatacgcatggcgtttaccgccgcgccgtccgcggtgtttttatcgccgcgtcctaaccatttgtagccagccagcgccgcactttcggtgacgcgggaaaattcgatggcaagttctcgtctcatagcaaactctaagcagtaaggaatggcgcgaagtgtagcacaggggaagggagggattattgatgtgtgcggggttgcccccgcacgtttcgggactaccggatgcggcataaacgcttcattcggcatttacattattcgtcgtgttcttcccacgccatcgcgcgtttaaccgcttttttccagcctgcgtaacggtaattacgctcagtggtttcgatgcctggacggaactcgcgctcaatcaccgctttctcttgcagctcgtcgaggttctgccagaagccaaccgccaggcctgcgagataggccgcacccaatgcggtgacttcgcgcacttccgggcgctcaacgcgggtgccgagaatatcggactggaactgcatcaggaaattgtttgctactgcgccaccatccacgcgcagggcgtgcagacggataccagagtcggcctgcatcgcttccagcacgtcacgcgtctgataagcaatagactccagcgtcgcgcgtataatgtggttagcgttcaccccacgagtcagaccgaaaatcgccccgcgcgcatacgggtcccagtacggcgcacccagcccggtaaatgccggaaccacatacacaccattggtgttttgcactttggtggcgaaatattcggaatcgtaggcgtcgttaatcaacttcatttcatcgcgcagccactgaatggatgcgcctgccataaacaccgcaccttccaacgcatagttcacttcgccagtcgggccgcaggcgatggtggtcagcaggccgttttcacttttcaccgctttctcgccagtgttcatcagcataaagcagccagtgccataggtgttcttcgccatcccttctttcacgcacaactgaccaaacagcgcggcctgctggtcaccggcgatcccggagattggaatacgcgtgccgcctttgccgccaatgttagtctgaccgtatacttcggaagaacgacgcacttctggcagcatctcgcgcggaatatccagcacttccagcattttgtcgtcccagtccagggtatggatgttgaacaacatggtacgagaggcgttggtgtaatcggtcacatggacacggccctgagtcattttccagataagccacgtatcaaccgtaccaaacagcaattcaccacgacgtgcacgctcgcgagagccttccacatggtcgaggatccacttcactttggtgccagaaaagtacgggtcaatcaccagaccggtattgctgcggatataatcttctaaaccgtcacgttttaaatgctcgcagatttctgcggtacgacggcactgccagacaatggcgttatagataggcttgccggtttctttttcccagacaatagtggtttcacgctggttcgtaataccgatagctgcaatttgatcggaactgatatcggctttcgccagcacttctaccagcgtggagctttgggtggcccagatttccattgggtcgtgttctacccaacctggttttgggtagatttgctcaaattcgcgctggctcacgctaatgatattggcatcgtgatccattacgaccgcgcgggagctggtggtgccctggtcgagcgcaacgatatattttttttcagtcatgtttaattgtcccgtagtcatattacaggctagctttttgttcactaggagttgtggtttccttttcttccacaacacagatatcgcaaggcaaatggcgaccaatcagtttgcggtaggcaaatgcacctacaatcgcgccaacgatagggccgaaaagcggcaccaggaagtaaggaatgtctctgccgccggtaaaggcgacattgccccagcccgccagccaggcaaagactttcggaccgaagtcacgcgctgggttcatggcaaaacctgtcaatgggcccatagatgcgccaatgaccgcaatcagtagaccaatcagcaagggagccaaagggccgcgtggtacaccgttgccatcgtccgttaacgccaggatcagccccatcagaatagcggtaatcaccatctcaactgcgaaagcctgcacaaaattgatatgaggattagggtaagtagagaaagtgccagccagatcaacactttcaacgctgccgcgaacaatgtgatgagtctgctcgaagtcgaaaaataaattgtagtaaagcccgtaaactaaagccgcagcacagaaagcgccggcaacttgactaacgataaaaggaataactttgcgcttgtcgaaacaggcaaacagccacaatgcaatggtaacagcgggattaagatgcgcgccggaaacccctgcggtcaggtagatggccattgccacccccagtccccaaatgacactgatttcccactgaccaaaagacgcaccagcgacttttagtgctgcaacgcaacccacaccgaagaaaatcaacaacccggtaccgaggaattcagcaatgcactggcctttcaaggtacttgtttgactcataatcggatcctgaagagttaatgtttgttgtatgcgtgaaagtcacggacctccacgatgcttgtaggcatgctgtaaacttatcgttaacgagcaaaaacgagaaatatcgaacttaaaatgtgtgtgcctcgtcataaaatgagcgttatcgcgccatttattccatctgattgtacatgatgcatgtttgttagatcattcgcgcaacaaatttattaacattttcgattgatgtggattatgtcaccaggagaaggatgaaaagtgtggcaaaccgtaatctgcaaggcgtgccgctggacagcgatggcgcggcttcatacaatcggagctaactaaagtgcgctcgtatttattaaggcgtcaccggtaatcgggacgaggatttttatccatcaacgccttgcaattcaggagaggtatgacaatgagtttagaagtgtttgagaaactggaagcaaaagtacagcaggcgattgataccatcactctgttgcagatggaaatcgaagagctgaaagaaaaaaacaacagtctgagccaggaagttcaaaatgcccagcatcagcgcgaagagctggagcgtgagaacaaccatctgaaagaacagcagaacggctggcaggaacgtctgcaggccctgctgggtcgcatggaagaggtctgattacgcttcatcttccgcgtaatttctttactgtgtaggccaacaggtaacgcagaaaaaaggcaccttgcggtgcctttcttatcattcaatatccagcggatcttcactaagaataatcccggtattgtcggcataaagatggtcgccggagaagaaggtgacaccgccaaaattgacgcggacatcgctttcgccaatgccttcgccagcggcaccaaccggaattgccgccatcgcctggatgccgatatccaactcttccaggtcatctacctgacgcaccgcgccgtaaatgaccagaccttcccattcattttgtactgccagacgcgccagttcagcatcgaccagtgcgcgacgaacagaaccaccgccatcgacgacaagaacacgaccacggccattctgttcgagcagatcgtacagcaacccgttgtcctcgaaacattttaccgtgattatttgtccgccaaagctcgcccgtccgccaaagttggagaacagcggttccacgacgttaacatcttcttgatagatgtcacaaagctcggaagtatcgtatttcataggcttaacattcagttgctgcgagaattttcagtatatcgcgctatgtgggctgttggcaaaatcatcaattgttaattgatatttgtcagttatgctgcccactggcttaggaatatccctaaaacaaacagcaggttagtcagtaacgctcccttgacagtacgttccagcattggtcgcatcgccaccgggtccatttcccgcatcacataacgggcttgcttcaccagtaatggtgccgccagcaggaacagccagccccacaggctatgcaggctaaagagattaaacagcgccagacacaccaggctgcccatcagcaggcaggcatgataacgacgcgcgttcacttcacctaagcgcaccaccagcgtgtttttgccattttcgcggtcgctattgatatcacgcaggttattaatattcagtactgccgttgccagcaggccgcatgcggtcgccggaaggatcagtgccggaatcaatgtatgagcctgtaaataccagctccccatgacactcaaccagccaaagaaaaccagtacggaaatatcacccagaccgatataaccataaggacgattgcccacggtgtaggtgatagcggcaatgatgctcaacccgccaagaatcaggaaaccgacaaaatcggccagcgtatggcatgccactgcaaccagtgccagcccggagagacagatgagcacgacggtaataatgagcgcccgtttcatctcttgctgggtaatgacccctttttgcatgccgcgtagcggcccaatgcggtcaggtttatcgctgccttttaccgcatcgccgtaatcattggcgaggttagaaaggatctgtaatagcccggcggtaattagtgccagcagggcgaccagcggatcgaagtgaccttgccaccatgccagcgctgtcccgacgataattgcagcaaaggcgagggggagggttttaggtcgtaaactttccagccacgcctgagttcggctaatttgttgttcagtcataatacgcgccaataaaaatggggcctttcagccccatcaaacaatgatgaaaatgattgaacgcgattataggataaaacggctcagatcttcatctgccaccaacgcatccagatgtttgctcacataatctgcgtcaatagtgatattttgaccgcttaaatcgctggcgtcgtaggaaatctcttccattaaacgctccagaacagtgtgtaaacgacgagcaccgatgttttcggtagattcgttcacctgccatgccgcttccgcgatgcgtttaataccggagtcggtaaactcgatatttacgccttcagtcgccatcagtgctttgtactgcacggtgatagaggcattcggctcggtcagaatacgctcgaagtcgctggtggtcagcgcctgcagttcaacgcggattggcagacgaccttgcagttccgggatcaggtcagacggtttcgcaatctggaacgcgccagaagcgataaacagaatgtggtcagttttgaccatcccgtgtttggtggaaacggtgcaaccttctaccagcggcagcaggtcacgctgaacgccttcacgagaaacatccggaccggaagactcgccgcgcttacagattttgtcgatttcgtcgataaacacgatcccgtgctgctcaacagcgtcgatagcgtcttgcttcagctcttccgggttcaccagtttcgccgcttcttcttcaatcagcagcttcatggcgtctttgattttcagcttacgcgctttttgcttctggccgcccaggttctggaacatggactgcagctggctggtcatctcttccatgcccggaggagccataatttcaacgcccatcggtgctgcggcaagatcgatctcgatttctttgtcatcaagctggccttcacgcagttttttgcggaatgcctgacgagcagcggacggttcctgctgctgttcggtctgtccccagttgtttttagcaggtgggatcagcacgtcgagaatacgttcttctgccagttcttcagcgcgataacggtttttctcgatagcctggacgcgtaccattttcacggcggcatcggtcagatcgcgaataatagaatccacttccttaccgacgtagcccacttcggtgaatttggtcgcttcaactttgatgaacggcgcattcgccagcttagccagacgacgggcgatttcagttttaccgacaccggtcgggccgatcatcaggatatttttcggggtcacttcatggcgcagctcttcgttgagctgcatgcgacgccagcggttacgcagagcaatcgccacagaacgcttggcgttgtcctggccgatgatgtgcttatccagttcgctgacgatttcgcgtggggtcatttcagacatgggagatccttacgctttgtagcttaattcttcgatggtgtggaaatggttggtatagatgcaaatgtcgcctgcaatatccaacgccttttcagcaatttcacgggcgctaagttcagtgttttctaacagcgcgcgcgccgcagcctgggcgtaagggccgccggagccgatagcaataagatcgttttctggctgcaccacgtcaccgttaccggtgatgataaggcttgcagtttcatccgcgactgccagcagtgcttcaagtttgcgcagcatgcgatcggtacgccagtcttttgccagctcaacggcggctttgaccagatggccctgatgcatttccagtttacgttcaaacagttcgaacagcgtaaaagcatccgcagtaccgcccgcaaagcccgcgatgactttgtcgttgtacagacggcggacctttttcacgttgcctttcattacggtattgcccaacgtggcctgaccatcaccagcgatgaccacatggccgttacggcgtacgcttactatagttgtcacgagctgaccccttggttacgaatacagagtacaaaccccgtacaaaagtacggggcataatgcaattatagatgggggggattttgagggtttcaacccccggcggcgagccgaatgcagtttgtatgacccgccatcttcaaccgattgagggtgctgtctgcgttctctttgcctttcaccgggccaatgaccacacgattccagccattgttggtggtgattttgctgtcaaagccttcgaacgccagctgagcacgtaccgtctctgcctgttccgcgcctctgaagctaccgcactgcaccatccagcggcgttcgtcttttttctccgccgtcggttttggcgcgtcagcggcacgagcaactggcgcagcttgctgcggcttgctctgcgcagtcgtgtgcgcaggagtttgcagcagatcctggtacggctgctgagaagaagccggtttagactggcgcggttgcgcctgtaccggtgcggcttggctcgtacgcgtctgctgctgccagctttgttcagtcgtacggctctgctgagccaggcgttgctgttccgctaattgctgcgcctgacgttggcgctgtagcgtttgctgacgctgttccggcgtctgttcattccacggaacttcaaccagctgcgttggctgctggcgcatatcagcctgcatttgttcaagaagctgacgttgttctggtgtcagttgctccggcgttttcacttcaccaccggcagaaggttctgtgggcgcacgcactcccggctggcgactttccagctctttaatgtagcgccagcgttcttctggttttggtggtagtccgtttccggtcactttctggctttgcagcgtctcggactcttctttcttgtgatgcgtaatgaagtacagaccaccgataaaggtcacaagaacggcggcagcaatagcgaccatagcgggagaaaccgcaggcagatttcgttgctttttccgactggtgctcttttttcgccggctaggtgccggttggctgcggcgtacataatctcgttgtgccactatcgtttcgctgtatttattcgttcgtcagcccgccatgttacttaagcggcgggcctttgaccagtcacggcagtcttaaaggtttactttaaggtaacgcgcgtgtacttccccggatgataagttcgcagtccattaaacgagagccactgccaacgtgttgcccctgcatttgatcaagcaataacagcatagcttcccgaccgatttcgtaacgcggctgcgcgatggttgtcagcggcggatcacaaaattgcgtcaggtcgatgttatcaaaaccgattatggaaaggtcttccgggactttcagcccctggcgttttgcctgagaaagtgcgccgagcgccatcacatcgctatggcagaagacagcagtaggcggttgtggaagatcaagcagctgctgcatcgctttgcttccggcttcgaaggtgaagtcgccacgggcgatgtattgcggatcaaccataatgccgcagcgacgcagcgcctgaacatagccttgcaggcggtagtgacacagcggcatctcttcgggaccggctatacagccaatccgtttatgcccttgctcatataaataatttactgcatcaaatgcggcggtcagattgtcgatatgaactgtaggcagctccagctccggtgcaaattcgttcgccatcaccatcggcggcagattacgctgttcctcaatgctggcatcaaacggcagcctactacccagcaacaacatgccatcaatttgcttggtgatgatcaaatcgataaaggttttttcctgctgattttgatgcgcacagtcgccaatcagcaccagatatccgtgatttgccgccgtaacttcgataccgcgaataatttcgctaaagaagggatcgcagatatccgggacaatcaccagaatggtgcgggattcattacgcttgacgttgcgccccataggctgcggtaaataacccacttcccgggccgctttttcaacccgattacgggtggcctgggagactttatcgggattcattaatgctcgggagacggtcgctgtagagacttttgccttgagggcaacgtctttcatggtcgcggcagtttcctgcttcttcgctttcacactcactcctcgcctggcacgtcaggcgtactacatccatgtttacttcacatcggcaacatttttagcagatagcgcgtgaaaacggttacagaattttcatgaaaagtgtgatgaatattgaatttttcgatccgcctcgcatcgtgagcggtttaaccctcaatcggatcaacatccagcacccatttcaccttacgggaatccggtattgtattgatgagcgccagcgtaccgttaatgatgtgttgcaagcgcacgcgggaagggtgctgcaacaatatctgccagcgccagcgaccgccacgtttaggtgccagagccggaaccggaccgagaacccacagtttctcgtctgccagtgggctggagaggatcagattacgcagttgttgcaggaacaatggcgcgtgctgattgttatgatcttccgcacgcacaatcacatggctggtccacggcggtagctgcatcattcgccgctcagccagcgcctgttcggcaaaggcgtcgtagcctttatagagcaacgtttgcaacagaggatgttccggatggtgcgtttgcagcaccacttcgccctgtttacccgcacgcccggcacgaccggcgacctgggtgtaaagctgagcgaaacgctctgcgctgcgaaaatcggcagaaaacagcgcgccgtccacgtccagtaatgcaaccagcgtcacatccgggaaatggtgacctttcgccagcatttgtgtaccaatcaaaatccgcgcgccgccgcgatgtacttctgccagttgctgttccagcgcccctttgcggctggtggtatcgcggtcgatacgagaaatgggcacgccggggaacaacggcgcgagcgtctgttcaagctgttcggtgcccagccccacggggaccaggtgcgtggaaccgcaggaagggcactggcgcggcaccggacgctgactgtcacagtggtggcagcgcagatggtgctgcgcctgatgcagcgtgtagtagtgatcgcaacgtgggcattcggcaatccagccacagtcgtggcacagcagtgcaggcgcaaagccacggcggttaagaaagagaatgacctggttatcagcctgtaaatgctggcgcatacgagtgattaacgccggagccagacctgcctgcaccttctgaccttttaaatccagcacatgttgaattgccggacgcgcattccctgcccgacgggtcaggcgcagcaggcggtattttttctgctggacgttgcataacgtttccagcgcgggcgttgcggagccaagaataatcgggatttgctcgctgtgcgcacgatacaccgccaggtcgcgggcatgatagcgccagccttcctgctgcttgtaggagctgtcgtgctcttcatcaatgacaatcacgccgagatttttaaacggcgtaaacagcgcggagcgggtgccgatcacaatcgccgcctcaccatttttcgctttcagccacgcgctaagacgctcgctgtcgttcaggccggaatgcagaacttccacgggggcattaaaacgttcacgaaaacgggcgatagtttgcggtgtcaggccgatttccggcaccatcaccagcgcctgtttgccctgagcgagcacgttttccagtacgctgagataaacctccgttttaccggaaccggtaacgcccgccagcagccaggcagaaaaagtatctgccgcgctatgaattgcgccaacggcggtggcctgttcggtattcaatcgcaaccgctcaccagaaacggcatagttcgttcgccagtcgctaaactctggtgtttcacttgctaaatcacacagaccttttttgcgtagcgcctgcaacgcggcatcattaaattcgagcgtggcgacctggtcgcgccagattttgccttgccgtaacgccgccagcgcctgttgttgcttgggggagcgtttcaggctgttcagatccaccgcctggccttgttcagtggcaaaccagtaccacatcggcgcgttcgccgcaggccgcccctggcgtagtaaaatcggcaaggcatgaaacagcacatcgccaatcggatgatgatagtaatctgccgcccatagcagcaatcgccagacggagtgagtaaacaccggctcactatccagcacttcgactaccgcttttagctcattgagcggcagttcgctggcatcgctaacacttaccacaatcccgatgcgctcctgctgtttgccaaacggcacgcgcacgcgacacccagctttaaccgtcatgccttctggcagcagatagtcaaaggtacgaggaagcggaacgggcaaggcaacgtgggcaacgggcatagcatcatcctgacttgaaattcggtgggttagtatacacattgccgtagaagagtgcggatcagtttgcatacgctggttaatttctgtatgatttcgcgccttcgtacgaaatgatcgtattgaagctatacttttaacatcgcgtggtgtctggcgttagggctggaagagcgacgcggccttaaaccgaggttttcccatgaaaaaagatattcacccgaaatacgaagaaattactgctagctgctcttgcggtaacgtaatgaaaatccgctccaccgttggtcatgacctgaacctcgacgtgtgcagcaagtgccacccgttcttcactggcaaacagcgtgatgttgctaccggtggccgtgttgaccgcttcaacaagcgtttcaacatcccgggcagcaaataagaccggatttccgaaaaaagcgccgcacggcgctttttttgtgcctgaattttggtcgtattaccagctaaacagcggccattctttggcgaccgtggtgagttgtggcgcatcgaaaacggcttgtgggctgaccaccgtttcctcaagcggaatattcttgccgtaacgttctttgagctttgcctgaacttgtgggctgctcaggtcgaactctttcaacttctgctgctcgcccacgcgcattcccagcgcgttctggtaaaccttccacaccacttcgctacagtactggcgatcgtcgctccaactgaagctgaaatcatacggtttaccgagataacgttttgccgtttgcgccagtttttgctgttgttcaacactcagtccgccttcaacgcggcgaacaacgtatttgcccttttcaccatgggcgatccactgcttgagcggggtgtatttcaccgggccgactgcttcaaaaacgtagggctttttgttgcgtatcaccagcataccggtgtggctataatcggtatgggtcgccagttggatcgctttactttggctactgcgagagatctgaaagatgatgtcgccggtttgtggctgccaggcaaaggcaggtacagaaaccagcaggctgaggatcagcagcctgtttttcatagttaaacgtccatgtataaaaagcggtgggtcgcagacaacgtgctcgttgtttatgccggatgcggcgtgaacgccttatccggcctacaagttcgtgcaaattcaataaattgcaatatgacgtaggcctgataagcgtagcgcatcaggcgattccactccgcgccgctcttttttgctttagtattcccacgtctccgggttaatccccatctcacgcatgatctcttttgccgcttccgggatttcgtcgctgcgctctttacgcagatcggcatcatccggcaaaggttgcccggtaaaggcatgcagaaacgcttcgcacagcagctcgctgttggtagcgtgacgcaggttgttcacctgacgacgcgtgcgttcatcggtgaggatttttaacaccttaagaggaatggaaaccgtaatctttttgacttgttcactcttcttgccgtgctcagcgtatgggctgatatattcgccgctccattcagccatgagatacttaatcctcttcgtcaataaattgagaccagaccacacagttgatgtgggtactgaccgtaaacccgcatagtttaccgtacaggcgttaccgtgacatcgtgtaatgcacctgtcggcgtgataatgcatataattttaacggctatttgggatttgctcaatctatacgcaaagaagtttagatgtccagatgtattgacgtccattaacacaatgtttactctggtgcctgacatttcaccgacaaagcccagggaacttcatcacatgacgcgtaaacaggccaccatcgcagtgcgtagcgggttaaatgacgacgaacagtatggttgcgttgtcccaccgatccatctttccagcacctataactttaccggatttaatgaaccgcgcgcgcatgattacagccgtcgcggcaacccaacgcgcgatgtggttcagcgtgcgctggcagaactggaaggtggtgctggtgcagtacttactaataccggcatgtccgcgattcacctggtaacgaccgtctttttgaaacctggcgatctgctggttgcgccgcacgactgctacggcggtagctatcgcctgttcgacagtctggcgaaacgcggttgctatcgcgtgttgtttgttgatcaaggcgatgaacaggcattacgggcagcgctggcagaaaaacccaaactggtactggtagaaagcccaagtaatccattgttacgcgtcgtggatattgcgaaaatctgccatctggcaagggaagtcggggcggtgagcgtggtggataacaccttcttaagcccggcattacaaaatccgctggcattaggtgccgatctggtgttgcatagttgcacgaaatatctgaacggtcacagtgacgtagtggccggcgtggtgattgctaaagacccggacgttgtcactgaactggcctggtgggcaaacaatattggcgtgacgggcggcgcgtttgacagctatctgctgctacgtgggttgcgaacgctggtgccgcgtatggagctggcgcagcgcaacgcgcaggcgattgtgaaatacctgcaaacccagccgttggtgaaaaaactgtatcacccgagcttgccggaaaatcaggggcatgaaattgccgcgcgccagcaaaaaggctttggcgcaatgttgagttttgaactggatggcgatgagcagacgctgcgtcgtttcctgggcgggctgagcttgtttacgctggcggaaagtttagggggagtggaaagtttaatctctcacgccgcaaccatgacacatgcaggcatggcaccagaagcgcgtgctgccgccgggatctccgagacgctgctgcgtatctccaccggtattgaagatggcgaagatttaattgccgacctggaaaatggcttccgggctgcaaacaaggggtaaaaatgagtgtgattgcgcaggcaggggcgaaaggtcgtcagctgcataaatttggtggcagtagtctggctgatgtgaagtgttatttgcgtgtcgcgggcattatggcggagtactctcagcctgacgatatgatggtggtttccgccgccggtagcaccactaaccagttgattaactggttgaaactaagccagaccgatcgtctctctgcgcatcaggttcaacaaacgctgcgtcgctatcagtgcgatctgattagcggtctgctacccgctgaagaagccgatagcctcattagcgcttttgtcagcgaccttgagcgcctggcggcgctgctcgacagcggtattaacgacgcagtgtatgcggaagtggtgggccacggggaagtatggagcgcacgtctgatgtctgcggtacttaatcaacaagggctgccagcggcctggcttgatgcccgcgagtttttacgcgctgaacgcgccgcacaaccgcaggttgatgaagggctttcttacccgttgctgcaatagctgctggtgcaacatccgggcaaacgtctggtggtgaccggatttatcagccgcaacaacgccggtgaaacggtgctgctggggcgtaacggttccgactattccgcgacacaaatcggtgcgctggcgggtgtttctcgcgtaaccatctggagcgacgtcgccggggtatacagtgccgacccgcgtaaagtgaaagatgcctgcctgctgccgttgctgcgtctggatgaggccagcgaactggcgcgcctggcggctcccgttcttcacgcccgtactttacagccggtttctggcagcgaaatcgacctgcaactgcgctgtagctacacgccggatcaaggttccacacgcattgaacgcgtgctggcctccggtactggtgcgcgtattgtcaccagccacgatgatgtctgtttgattgagtttcaggtgcccgccagtcaggatttcaaactggcgcataaagagatcgaccaaatcctgaaacgcgcgcaggtacgcccgctggcggttggcgtacataacgatcgccagttgctgcaattttgctacaccagtgaagtggccgacagtgcgctgaaaaacctcgacgaagcgggattacctggcgaactgcgcctgcgtcaggggctggcgctggtggcgatggtcggtgcaggcgtcacccgtaacccgctgcattgccaccgcttctggcagcaactgaaaggccagccggtcgaatttacctggcagtccgatgacggcatcagcctggtggcagtactgcgcaccggcccgaccgaaagcctgattcaggggctgcatcagtccgtcttccgcgcagaaaaacgcatcggcctggtattgttcggtaagggcaatatcggttcccgttggctggaactgttcgcccgtgagcagagcacgcttagcgcacgtaccggctttgagtttgtgctggcaggtgtggtggacagccgccgcagcctgttgagctatgacgggctggacgccagccgcgcgttagccttcttcaacgatgaagcggttgagcaggatgaagagagcttgttcctgtggatgcgcgcccatccgtatgatgatttagtggtgctggacgttaccgccagccagcagcttgctgatcagtatcttgatttcgccagccacggtttccacgttatcagcgccaacaaactggcgggagccagcgacagcaataaatatcgccagatccacgacgccttcgaaaaaaccgggcgtcactggctgtacaatgccaccgtcggtgcgggcttgccgatcaaccacaccgtgcgcgatctgatcgacagcggcgatactattttgagcatcagcgggatcttctccggcacgctctcctggctgttcctgcaattcgacggtagcgtgccgtttaccgagctggtggatcaggcgtggcagcagggcttaaccgaacctgacccgcgtgacgatctctctggcaaagacgtgatgcgcaagctggtgattctggcgcgtgaagcaggttacaacatcgaaccggatcaggtacgtgtggaaagcctggtgcctgctcattgcgaaggcggcagcatcgaccatttctttgaaaatggcgatgaactgaacgagcagatggtgcaacggctggaagcggcccgcgaaatggggctggtgctgcgctacgtggcgcgtttcgatgccaacggtaaagcgcgtgtaggcgtggaagcggtgcgtgaagatcatccgttggcaagtctgctgccgtgcgataacgtctttgccatcgaaagccgctggtatcgcgataaccctctggtgatccgcggacctggcgctgggcgcgacgtcaccgccggggcgattcagagcgatatcaaccggctggcacagttgttgtaatttcagaaatttaataatgcccggtactcatgttttcgggtttatggtttctaatgaaatatattgaattatcataggattaggccggattaagcgtttacgacgaatccggcaagaagcaataagtacatggttagtttatatttgcagtccggtttgctttgcataccggattttctttttcttaccatcctgaagttttttcatcttccctgatttttcctcaccatcattggtcatttttcggttgacgcccttcggcttttccttcatctttacatctggacgtctaaacggatagatgtgcacaacacaacatataactacaagcgattgatgaggtaaggtatgagcttttttcacgccagccagcgggatgccctgaatcagagcctggcagaagtccaggggcagattaacgttagcttcgagtttttcccgccgcgtaccagtgaaatggagcagaccctgtggaactccatcgatcgccttagcagcctgaaaccgaagtttgtaagcgtgacctatggcgcgaactccggcgagcgcgaccgtacgcacagcattattaaaggcattaaagatcgcactggtctggaagcggcaccgcatcttacttgcattgatgcgacgcccgacgagctgcgcaccattgcacgcgactactggaataacggtattcgtcatatcgtggcgctgcgtggcgatctgccgccgggaagtggtaagccagaaatgtatgcttctgacctggtgacgctgttaaaagaagtggcagatttcgatatctccgtggcggcgtatccggaagttcacccggaagcaaaaagcgctcaggcggatttgcttaatctgaaacgcaaagtggatgccggagccaaccgcgcgattactcagttcttcttcgatgtcgaaagctacctgcgttttcgtgaccgctgtgtaagcgcgggcattgatgtggaaattattccgggaattttgccggtatctaactttaaacaggcgaagaaatttgccgatatgaccaacgtgcgtattccggcgtggatggcgcaaatgttcgacggtctggatgatgatgccgaaacccgcaaactggttggcgcgaatattgccatggatatggtgaagattttaagccgtgaaggagtgaaagatttccacttctatacgcttaaccgtgctgaaatgagttacgcgatttgccatacgctgggggttcgacctggtttataaatagtgtggcttttgtgaaaatcacacagtgatcacaaattttaaacagagcacaaaatgctgcctcgaaatgagggcgggaaaataaggttatcagccttgttttctccctcattacttgaaggatatgaagctaaaacccttttttataaagcatttgtccgaattcggacataatcaaaaaagcttaattaagatcaatttgatctacatctctttaaccaacaatatgtaagatctcaactatcgcatccgtggattaattcaattataacttctctctaacgctgtgtatcgtaacggtaacactgtagaggggagcacattgatgagcacgagtgacgatatccataacaccacagccactggcaaatgcccgttccatcagggcggtcacgaccagagtgcgggggcgggcacaaccactcgcgactggtggccaaatcaacttcgtgttgacctgttaaaccaacattctaatcgttctaacccactgggtgaggactttgactaccgcaaagaattcagcaaattagattactacggcctgaaaaaagatctgaaagccctgttgacagaatctcaaccgtggtggccagccgactggggcagttacgccggtctgtttattcgtatggcctggcacggcgcggggacttaccgtagtatcgatggacgcggtggcgcgggtcgtggtcagcaacgttttgcaccgctgaactcctggccggataacgtaagcctcgataaagcgcgtcgcctgttgtggccaatcaaacagaaatatggtcagaaaatctcctgggccgacctgtttatcctcgcgggtaacgtggcgctagaaaactccggcttccgtaccttcggttttggtgccggtcgtgaagacgtctgggaaccggatctggatgttaactggggtgatgaaaaagcctggctgactcaccgtcatccggaagcgctggcgaaagcaccgctgggtgcaaccgagatgggtctgatttacgttaacccggaaggcccggatcacagcggcgaaccgctttctgcggcagcagctatccgcgcgaccttcggcaacatgggcatgaacgacgaagaaaccgtggcgctgattgcgggtggtcatacgctgggtaaaacccacggtgccggtccgacaagtaatgtaggtcctgatccagaagctgcaccgattgaagaacaaggtttaggttgggcgagcacttacggcagcggcgttggcgcagatgccattacctctggtctggaagtagtctggacccagacgccgacccagtggagcaactatttcttcgagaacctgttcaagtatgagtgggtacagacccgcagcccggctggcgcaatccagttcgaagcggtagacgcaccggaaattatcccggatccgtttgatccgagcaagaaacgtaaaccgacaatgctggtgaccgacctgacgctgcgttttgatcctgagttcgagaagatctctcgtcgtttcctcaacgatccgcaggcgttcaacgaagcctttgcccgtgcctggttcaaactgacgcacagggatatggggccgaaatctcgctacatcgggccggaagtgccgaaagaagatctgatctggcaagatccgctgccgcagccgatctacaacccgaccgagcaggacattatcgatctgaaattcgcgattgcggattctggtctgtctgttagtgagctggtaagcgtggcctgggcatctgcttctaccttccgtggtggcgacaaacgcggtggtgccaacggtgcgcgtctggcattaatgccgcagcgcgactgggatgtgaacgccgcagccgttcgtgctctgcctgttctggagaaaatccagaaagagtctggtaaagccagcctggcggatatcatagtgctggctggtgtggttggtgttgagaaagccgcaagcgccgcaggtttgagcattcatgtaccgtttgcgccgggtcgcgttgatgcgcgtcaggatcagactgacattgagatgtttgagctgctggagccaattgctgacggtttccgtaactatcgcgctcgtctggacgtttccaccaccgagagtctgctgatcgacaaagcacagcaactgacgctgaccgcgccggaaatgactgcgctggtgggcggcatgcgtgtactgggtgccaacttcgatggcagcaaaaacggcgtcttcactgaccgcgttggcgtattgagcaatgacttcttcgtgaacttgctggatatgcgttacgagtggaaagcgaccgacgaaagcaaagagctgttcgaaggccgtgaccgtgaaaccggcgaagtgaaatttacggccagccgtgcggatctggtgtttggttctaactccgtcctgcgtgcggtggcggaagtttacgccagtagcgatgcccacgagaagtttgttaaagacttcgtggcggcatgggtgaaagtgatgaacctcgaccgtttcgacctgctgtaatctgaccccgttcagcggctgcttgctggcagtcgctgaacgttctttaccagcgtatagtgggcgaacgaaaactacacactggatctctcatgtctgccgcaggaaagagcaacccactggcaatcagtggcctggttgtgctcacacttatctggagttatagctggattttcatgaagcaagtcaccagttacatcggtgccttcgactttaccgccttacgctgcattttcggcgctctcgttttattcatcgtccttttattacgtggtcgcggaatgcgcccgacaccgtttaaatacaccttagccattgccctgttacaaacctgcgggatggttggtctggcgcagtgggcgttggtcagcggaggtgcggggaaggtggcgatcctgagctataccatgccgttctgggtggtgattttcgccgcgttgtttctcggtgaacgcctgcgacgtgggcaatatttcgcgattctgattgccgctttcggcttatttttggtgttgcagccgtggcaactcgatttctctagcatgaaaagtgccatgctggcaatcctctccggcgtcagttggggggcgagcgcgattgttgctaaacgtctgtatgcccgtcatccgcgcgtggatttattgagcttaacatcctggcagatgctgtatgcggcgctggtgatgagtgtggtcgctttactggtgccgcaacgtgaaattgactggcagcccaccgtgttctgggcgctggcctacagtgcgattctggcgacggcactggcgtggagcttatggttgtttgtattgaaaaacttgcctgccagtattgccagcttaagcacactggccgttcccgtttgcggcgtactcttttcctggtggctgctcggcgagaatccgggggccgttgaaggtagcggtattgtgctgattgtgctggcactggcgctggtgagccgtaagaaaaaagaagccgtcagtgtaaaaaggatctgaattttttcttcatgtggggcgatctcttatttaacaaaataacgataatgccccaccatccgccagttaaacagcacatcttcttcctgcgcgcctgcgccaatgttatgtatcaccagcggcgtaccgtcgcgggcgaagccatcactaaccaccccaatatgtgccagcccgttatccagtcgccaggagacaatatcgcccgcttgatagtcactggggttcttgctggtggggcgtgttttatcatggcggctaaaccaggtttccagattaggcacccgacggtgatcgatgttgctgtccgggcgctttaacttccatttttgcgggtactcagcaaaattcttcgccatatcttcgtgaaccagtttctgcaaatcgaccttctggctgcgcaatgcgcggatcaccacatcggaacatacaccgcgttcttgcggaacatcaccgccaggataagtaagctgcacatacgccggatcgtaaaatagcgtgctgccaatttgctgtctggcaccgtctgcgatggcaaggttggtattggcctggatttgtaccacggttggtggaacggcgggagattttaaggagtggctggtaaatgccgttagcaggctgagcagcgccagactagctttcatctggttcgtccgtgaaaataagagtcacagattcgaccttccgggctaacgattgttctgtagagaaaatgtccagaagcggataaaaaattcctgaacaacgtgggagtttcagattactggcacagagtgccggatgcggagtgaacgccttatccggcctacaaaagcacgcaaattcaatatattgcagagattgcgtaggcctgataagcgtagcgcatcaggcaattttgcgttcaaactcccggacaagccgggagtttggagtaggttattcccactcttgcaggaaacgctgaccgtactggtcggctaccagcagagcggcgtaaacctgatctggcgtcgcgccgccaggcatgttgtgaatggtttcaccttctgcacatgccgcttctgccacaattcgcattttcgccgggacatcttctttaatatccagttgagcgagagttattggcaaacctaccgcatggctaagggcagctacggtttcgatttcctccaccggcgcattttccagaaccagctgcgtcagcgtaccgaatgccactttttcaccgtgataatagtgatgcgcgtccgggatagcggtcaggccgttatgcactgcgtgcgccgcagccagaccaccactttcaaaaccaacaccgctcaaataggtgttcgcttcaatcacgcgctccagcgccggagtcactacatgctgttcggcagcaagcatcgctttttcgccttcttccagcagggtgttgtagcacagttcagccagtgccagcgcagcctgggtgcacttgccgcccgccatggtggtcgcgccgctacgagagcaggcacgcgcttcaaaccaggttgccagcgcatcgccgatacccgccgctaacagacgtgcaggtgcgccagcgacgattttggtgtcgacaatgaccatattcgggttatttggcaacagcagatagcggtcaaactcaccctcatcggtgtagataacagacaatgcgctgcacggtgcatcggtagaggcgatagtcggtgcgatcgctaccggaacacccatgaaatgtgccagtgctttggcagtatcgagggtttttccgccaccgataccgagaattgcgccacactgcgcagtctccgcgatgccacgcagacggtcgatctcattttggctacattcaccgccaaacggcgcaatttctactaccagtccagcatctttaaagcttttctcgacagtggattgagcaaaacctaaaacaaatttgtcacccaccactaaccagcgttctgccagcggcttcaggtattcgcccagacgattaatcacatcagcgccctggatgtatttacccggactttgaataatgcggtccataattgctcctttagagatgagtagtgccaaatgcggcattccagtcgtgttcgaacttctctatagcactctctaccgcaggggtgttgagcatttgttgcgctacatctaagggcagggtgatggattcacatcctgccagtaaacagtccagcgcctgacgcggcgttttaaagctggctgccagcaccatgctttctggcgcgtgcatttctaacagcgtttgcagctcctgaaccgtacgaatgccgtctccgccctgggcatctacgcggttaacatacggagcaacgtattttgcccctgccagtgcggctaataacccttgtgcggcgctatatacagcagtgccaagtgtagtaataccctcttttttcagtattttaattgctgccagaccttcggaagtcaccgggattttcaccacaatacccggaatagcgtcgcgcaggcgcttcgcttcttccaccatcccctgcgcgtcgcggctcatggtctgagcaaacagaatgccctcatcaccaatcgctttttgcagacgcggcagcacttcccatatggactccttgctggcagcgataatgctcgggttagttgtcaccccggcaatggggaatatgcgtgccagacgttcgacttctgcgacgttagcggtgtccagatacagttccatgatgtttccttttacagttccagttcatgttgcagcaggctggcgatagcgtcggcagaggcggcgttaaccagcgcgttacggaattcttcgtgcatgatgcggcgagcgaggcggctgaaaatgcgcatatgctgatcgcccgcagcgtgtttgttcagggttaacataatgatgaattgcgcttcatcatcgccccagcgcaccggcgcttgcagacgcgccacgctgatggtggattgctcaatgtgttcacttttgctgtgtggaatggcaaaactaaagcccagaccggtagagaaaacggcctcgcgcgcccacaagtcggcttccagtttacgcggatagcggcagcggcccgccagcagcaggttatcggtcatgcctttgagcacttcttctttgctgcgccagtcgctttccagtgtgatgcactcggcggtgaccagcggtgcgtcttgttgggtcatgcggaattgcgccagcaggtgttctacttccaggctagtacggcaggccattgcctggttgagcaacttgcggcactcacggctatcaagttgcgccatccgagctttcgccgccggaatacttggtgcgctcatgctgagttcatccagccctaagccgaccagcaacggcagcacggaacctttcgctcccagctcaccgcacagaccaatccatttgccctggcgatgcaccgcttgcacggcgtaatcgagcgcccgcaagaatgccggattcaggctgttgtagtgacgagtaaccttagcgttatcgcgatccaccgccagcagatactgcgtcaggtcattactaccaatactaaagaaatcaatctcttcgcagcattgatcgatgatgaacatcacgctcggcacttccagcatgatgccgagctggattttctcatcaaacggaatgtgttcgttacgtagttgctgtttggcttccgccagtttttctttcacccataagatctcttccatactggagatcatcgggatcatgattttcaggctgccgtgagcggaggcgcggaggatgctccgtagctgcgtggtaaacaagctcgcgtactcttcataaatacgcacggcgcgataaccgaggaacgggtttgcctctgcgggaatgttcagataatcaacgggtttgtcgccgccaatgtccatagtgcgcacaataatgctgcgtccgttggcggattccagcgcctgacaaaaaatgttgtacaactcgctttcgcccggtgcgctggtgcgatccatatagagcatttcagtgcggaacaaaccaacgccttccgcaccattgccgaatgcggcctgcgcttccacggagtgagcgatgttagcggcaatttcaatgcggataccgtcagcggtacgggcttgttgggtcagccagacacgctgttgctcacgcagggcgtcctgtacgcgggcttcttgctgataataacgagctacggcttcccctggctcaaccacaatcgccccggcgttgccgtcgatataaatcgtttgttgctgccacggagtaagggcatcaatatccacaccaaccagcgttggaatgttgaagctacgggcaaggatcaccgtatgactggtggtgccgccgcttttgagcaacaatcctttgaggtgatttttatccagttcgaggaactggctgggggtcagttcatcagccatacaaatggcgggctgcgtcagtttgcccggtgccgggaagcgttgctcaccgtagatttgctggagtaactggaagcagacgtcgcgtacgtccagggcacgttcttgcaggtagctgctgctggaacgggaaaactcttcgcaaaagtgattcgcgctggcaacaattgcttcggcgcagcttaatccggcgctgacgcctgccagtaaatgttcgcgcagggaagtatcgccagccagggatcggtgagcttccagaatcgcgctggtagcaccgtcgctatccagcagacgaaactcaatgtttttcagtaccagcgtcaggccgttttccagtgcggattgctcggcgtcaacgcctttggctgcgggaagattacccagcgcattgagatctaaagaagagatcggcgtcagaatgccgcctgcactaccgctgcacacggtgcgggcgcggataatttgcggattcagattggtcagactaaccggcagtggttccagttcgtcagatttaacttccgccagcggcgcatcgcagtgggggaattcatcgcgcagccattggcttaaacgctggtgcgcttcctgttcgtcggccccggaaatcagtaactggcagttatcgcccgccagcgtatcggtgccaatcagcgcaagggcgcttttggcgttgcccttgcggtcagtgcgcaggttatgccactcaatttgactactaaaagtattacacagcgtttcaacgtggcttgccggacgcgcatgtacgccgttaggtagctcacaaataaattccacaatcagggccattgcctctctcccggtacggttttctgtttacaggataagagcgcacggcaacggcctgccatgtgacaaatctgccaaaagctggacaaatgtaatgtaaccgtcaatttgcgacgcgtctcacaagacgctgttttgcggcatgcttccggtttatcgcaagttatgaggcggatcgcatttttgtactgatattacaaaagtccagtaaatggcctttttatccactgtttgctccgcctgcgattgcctattgtttcctccatcaaaaatatggacatgggctttcgcaagcccgggagcagcttatgaatgagttggtgcagatcctgaaaaatacccgtcagcatttaatgacgggcgttagtcacatgattcccttcgtggtaagcggcggtattttgctggcggtttccgtcatgttgtatggcaaaggcgcagtgccggatgccgtagccgatccaaatctgaaaaaactgtttgatatcggcgttgcgggcttgacgctgatggtgcctttcctcgcagcgtacatcggttattccattgcagagcgttctgcgctggctccgtgcgctatcggtgcctgggttggtaacagctttggtgcgggcttctttggtgcactgatcgccgggattatcggcggcatcgtggtgcattacctgaagaaaattccggtgcataaagttctgcgcagcgtgatgcctatcttcattattcctatcgtcggcacactgattaccgcaggcatcatgatgtggggcttgggcgagcctgtaggggcgttgaccaacagcctgactcagtggcttcaggggatgcagcagggcagcattgttatgctggcggtgatcatgggtctgatgctggcgttcgatatgggcggtccggttaacaaagtggcctatgccttcatgctgatttgcgttgctcagggtgtttataccgtggtggccatcgctgccgtgggtatttgtatcccgccgctggggatggggctggcgacgctgattggtcgtaaaaatttctccgcagaagagcgcgaaaccggcaaagcggcactggtgatgggctgtgttggcgttactgaaggggcgattcctttcgccgctgccgatccgctgcgtgtcattccttccatcatggtcggtagtgtttgtggtgcagtaactgcggcgctggtcggtgcgcagtgctatgcaggctggggtggtctgattgtgctgccggtggttgaaggcaagctgggttatatcgcagcagtggctgtcggagcagtggtgacggctgtttgtgtgaacgtgctgaaaagtctggcgcgtaaaaatgggtctagcactgatgaaaaagaagacgacctggatttggattttgaaattaattaattgaggaacgagccatgacgaaaattattgcagtaaccgcatgtcctagtggtgttgcccatacctatatggcagcagaggcgctggaaagtgccgcgaaagcgaaaggctgggaagtgaaagtagaaacccaggggagtattggtctggaaaatgaactgactgcggaagatgtggcgagcgctgatatggtgattctgaccaaagatatcggcatcaagtttgaagagcgttttgctggcaagaccatcgtgcgcgtcaacatcagcgatgcagtaaaacgtgctgacgccattatgagcaaaattgaagctcacctggcgcaaaccgcttaagttcttctcccgctcgcaagggcgggttcgctttcccacaggagttcctcatgacgaatcgtatctctcgcctcaaaactgcactgtttgccaatacccgtgaaatcagcctggagcgggcgctgctttataccgccagccatcggcaaaccgaaggcgaaccggtgatattgcgccgggcgaaagcaacagcgtatatccttgaacatgttgaaattagcattcgtgatgaagaactgattgccggtaaccgcaccgtaaaaccgcgcgccgggattatgagcccggaaatggacccttactggctgctgaaagagctggatcaattcccgacgcgtccgcaggaccgctttgctatcagcgaagaagataaacgtatctaccgtgaagagttgttcccgtactgggaaaaacgtagcatgaaagatttcatcaacgggcagatgacagatgaagtaaaagccgcgaccaacacgcagattttcagcatcaaccagacggataaaggccaggggcacattattattgattacccacgcctgttgaatcacgggctgggtgagctggtggcacagatgcagcaacattgtcagcaacagccggagaatcacttttatcaggccgcgttgttactgctggaagccagccagaaacacattttgcgttacgccgaactggcggaaacgatggcggcaaactgcacagatgcccagcgtcgcgaagagctgctgactattgcagagatctcccgccataacgcgcaacataagccgcagacgttctggcaggcgtgccagttattctggtacatgaacatcattctgcaatacgaatccaacgccagtagcctaagcttggggcgcttcgaccagtatatgttgccgttctatcagacaagtttaacccagggcgaagatgcggcgttcctgaaagaactgctcgaatctttatgggtgaaatgcaacgacatcgtgctgttgcgctccaccagtagcgcgcgttatttcgccggtttcccgaccggctataccgcactgctcggcgggttaaccgagaacggacgtagcgcggtgaacgtgcttagcttcctttgccttgacgcctatcaaagcgtgcaattaccgcaaccgaacctcggcgtgcgcactaacgccttgatcgacacgccgttcctgatgaaaaccgccgaaaccattcgcttcggtaccggtattccgcaaatctttaacgatgaagtggtggtgccagcgttcctcaaccgtggcgttagcctggaagatgcgcgcgactattccgtagtgggctgtgtggaattatctattcccggcagaacctacggcttgcatgacatcgcgatgtttaatctgctgaaagtgatggaaatctgcctgcatgaaaatgaaggcaatgctgcgctgacttatgaaggtttactggagcagatccgcgccaagatcagccactacatcaccctgatggttgagggcagcaatatttgtgatatcggccatcgcgactgggcacctgtaccgctgctcagtagctttatcagcgattgtctggaaaaaggccgcgatattaccgatggcggcgcgcgttataacttctccggcgtacaggggatcggtatcgccaacctgagcgattctctccatgcgttgaaagggatggtttttgagcaacagcgtttaagttttgacgaattgctgagcgtattaaaagccaacttcgcaacgccagaaggcgaaaaagtccgcgctcgcttaattaaccgcttcgagaaatacggtaacgatatcgacgaggtggataacatcagcgccgaactgttgcgccactactgcaaagaagtggaaaaataccagaacccgcgcggcggctacttcacgccgggaagctataccgtttctgctcacgtcccgttgggaagcgtggttggcgcgacgccagacggtcgttttgccggagaacagctggcagacggcggcttgagtcccatgctgggccaggacgcacaagggccaacagcggtactgaagagtgtcagtaagctcgataacacgctgctgtctaacggtacgttgctgaacgtgaaattcactccggcgaccctggaaggtgaagcaggattacgcaaactggccgacttcttacgggcgtttacccagcttaagttacaacatattcagtttaacgtggtgaacgccgacacgttgcgggaagcgcaacagcgcccacaagattatgccgggctggtggtgcgcgttgccggatacagcgccttctttgtcgaactgagcaaggagatccaggatgacatcatccgccggacagcgcatcagctgtaattaaactgtcgaaggagatccaggatgacaagttccgccggacagcgcatcagctgtaacgttgtggaaacgcgccgcgatgatgtggcgcgcattttcaacattcagcgttatagtctgaatgacggcgagggcattcgtacggtggtcttttttaaaggctgtccgcatctttgcccgtggtgtgctaatccggagagcatctccggcaaaatccagacggtacgcagagaggcgaaatgtctgcactgtgcgaaatgtttgcgtgatgcggatgaatgcccctccggggcgtttgaacggattggtcgcgatatcagccttgacgctctggaacgggaagtgatgaaagatgacattttctttcgcacgtccggcggcggcgtcacgctttctggcggcgaagtgttaatgcaggcggagtttgctacccgttttttacagcgactgcggctgtggggtgtgagttgcgccattgaaactgccggagacgcaccagccagcaagctattaccgctggcgaaattgtgcgatgaagtgttgttcgatttaaaaattatggacgcgactcaggcgcgggatgtggtgaagatgaacctgccacgcgtgctggagaatctgcgtttgctggtgagtgagggcgtcaacgtgatcccgcgtttaccgctgatccctggtttcacgctcagccgggagaatatgcagcaggcgctggatgtactgatcccgctgaatatcaggcagatccatctgttaccgtttcatcagtacggcgaaccgaaataccgcctgctggggaaaacatggagcatgaaagaggtgcctgcgccgagcagtgctgatgtggcaacgatgcgcgaaatggcagaacgggccggacttcaggttaccgtgggaggttaaaatggcatacctggtggcagtaaccgcctgcgtaagcggcgtggcgcatacttatatggcggcggaacggctggaaaagttgtgcctgttagagaagtggggagtcagcattgaaactcagggcgcgctgggaacggagaatcgtttagcggatgaggatatccgccgggcggatgttgctctgttgattacggatatcgagcttgccggtgccgagcgatttgaacattgccgctatgtgcaatgcagcatctacgcattcctgcgtgagccgcagcgggtaatgagcgcggtgcgcaaagtgctttctgcgccgcagcaaacccatcttattctggagtaattattctggagtagtcggtttttctgtcagttggctgtggtactgccggcgatattcgctcgggctgcgttcggtgtttttacgaaacagacggcagaagtagttgctgtcgacaaagccgcaggcgtgcgccacttcttttaccttcaggtcatagcctttcaataacgtcttagcgtgctccagtcgcgtgtgattcaggtattcgttaaaaccaatggcccccgttttttgaaacaggtggctgaggtaatttgggctaatataaaacgcctgtgcaacagattcgcgggtaagcgcggaggcatagcgttcgtcgatataatcgcgaatagcttcaaatagtgcctggctgcgactggcggtctggatttggctgccaagcaaatcgcggcagtggctaagcaggctggcgacgataagccttgccgtttgctgctcctgcggctgcatttgcatttcattgagcgtttgtagcagaaaagaacctatgcgtgggccgcgtcgggcgacgtgttgcttcgccagattttgatattgtttgccatcccattgcacgacgctgaagccgagttgctgtttgccaaacagcacgctaaaggtagtagcgggggcttgccattgtggaaaattccagccaccagcaggaacgtacagcacatcgccgggaactaacgttgctccagcgccggtatcaacaaactcaccttccagcacaatttccagccgtggaaaatcgacctgatacgcaagatcgggcaccgggccgttactgctggcaaagtaaatctggcgcagggacagcgggccgttgatcaggcgggagagcagatagctgacgtcgtgatacatgttattcccttaggtatgtagacgggaaaacagtaactggcattattaaaaaaggccacctgaaaagtgtggcctgaggggagttcgatgtaaacattgcggcagttgtattgccggatgtggcgtaaacgccttatccagcctaccgccgcgatctgtaggccggataagacgcgtcaagcgtcgcatccggcaaatagcgcctggctgataattactgattacccacctgatcgccatagggcagtgtgtcgtaatcgatcagtgcgtttttcttatacgggttaccaatccagcgggtagtttctttgaactgcggattcaccacactacgggttggatcgtaaccgtcgtaagataagcccgccaaatcactccaggtgtggatcagttccgccaggctgtatttacgatcaacatcctggctgaaatcacggggatgagtcgcttgccatttttcactcgtccacagcaggaacggaatggtgtacatatgacgcgtcgggttgtcctcattacgcccctgagttttgtgcggcggcgtgtcgtaaacctcttcaccgtggtcagagaaataaaccaggaaaccgttcgggtttgctgctttaaagtctttaatcaggctggcaaccacatgatcgttatacaggttagcgttgtcataatcgttataactctccagctcttccgcgtttaatcccggcggaacatgatcggtattgccatcaaacttgccctgattttccgggtagcggtatttgtatttgatatgcgtacccagcagatgaacaatgatcagtttcttcggcgcagggtcattcagcacttcctggaacggcttcagcacgttggtgtcgtattcacgcgcactctgcgtacgttgctggttcatgtagtactgcttgtcggtctggcggctaaataccgtcagcatggtattgcgggcggtcatcgtctgctggttggtgatccagaaggttttataacccgcctgtttcatcatgttcatcaggctcggctgcgtcagatacagatccgggttcttttcattggcaaaggtcagcgcctgttgcaggatttcaatggtgtacggacgagacgtaactacgttattaaacacggtcagattcggatcggttttatgcagcgcatccagctccggcgtggtttcacgcggataaccgtacagactcatgcgtccgcgctgggtgctctcgccaatcaccagcactaaagtgcgcggttcgttaccgctttcatctttgaaattagccagtggcggcaaggcattattttcattcagtaactttgttaggctgtttagttgctgacgatactgataatagccggtcaggaattgccacggtgcggcaggctccatacggctggccaggttatccaacgttttctcaaacggcttgtttttgataaacgtattcatggcgatcggatgcagaatcaagccataaagcagggcaaaagagacaacataacgccacggctttggaatatagaccgggcgcaggcgtgtccacagcagaactgccaccgccgtataggccagcgcgataagcacaattttcaggctgaaatactggcttaaatactcgctggcttcgttggtgttggtttcgaacatcacaaacagaacgctctggctgaactcctgaccgtagatgacgtagtagcacagcgccgccagagaggccgcccatagcaccacgccgattactgcggcaataattttaatccgcttcggaaagaggaataccgggatcaaccacaggctactgaataacaggctgtcgcgaatgccgttagtgccactataaccactgatgtaaataatggcctgtagcagagtagagaaaaaccaaaagtagagcagtgcccaacccagggctttccagctaaaaagaggtttagcctggacttctgtggaatgcatagtaagaacctgtcttgaaaaaatatcgccgaatgtaacgacaattccttaaggatatctgaaggtatattcagaatttgaataaaatgcagacagaaatatattgaaaacgagggtgttagaacagaagtatttcagaaaaccctcgcgcaaaagcacgagggtttgcagaagaggaagattagccggtattacgcatacctgccgcaatcccggcaatagtgaccattaacgcttgttcgacgcgaggatccggttcctggccttctttttctgcctggcgggagcggtgcagcaactcggcctgcaatacgttcagcgggtcggtgtaaatattccgtagctgaatagactctgcaatccacggcagatcggccatcagatgggaatcgttggcaatcgccagcaccactttgatgtcttcttcttgcaggttgcgtaactctttacctaacggccacagtgctttgtctaccaggcgttggtcatagtattccgccagccacaggtctgctttggcgaagaccatctccagcatgccgagacgcgtgctgaagaatggccaatcgcggcacatagcctccagctcgctctgtttgccgtcttcgaccactttttgcagcgccgtacctgcacccagccaggcggggagcatcagacggttttgcgtccaggcgaagatccacggaatggcgcgtagactctcgacgccgccggttgggcgacgtttcgccggacgactacccaacggcagtttgcccagttcttgttccggcgtagcggagcggaagtaaggcacaaaatctttgttttcacgtacgtagccgcggtagacatcgcaggagatgacactcagttcatccataatgcgacgccagctctctttcggctccggcggtggcagcaggttggcttccagaatcgccccggtataaaggctcaggctgctgacggtgatttctggcagaccatatttaaagcggatcatctcgccctgttcggttacgcgcaggccgcctttcaggcttcctggcggttgactcagcagcgccgcatgagcaggtgcgccgccgcgaccaatggaaccgccgcgaccgtggaacaacgtcagctcaatacccgctttttcgcaggttttgattaatgcatcctgtgcctgatattgcgcccaggaagctgccatcactcccgcatcttttgcactgtcggaatagccaatcatcaccatctgtttgccctgaatcaggccacgataccagtcaatattgagcagctgggtcatgacatcgttggcgttgttcagatcatcgagggtttcaaacagcggagcaaccggcatcgcaaacccgatacccgcttctttcagcagcaggtggacagccagtacgtcggacggcgttttcgccatgctgatcacgtaggcggcaatggagccttgcggtgcttcggcaatcacctggcaggtatcgagcacttcgcgcgtttcggcgcttggttgccagttgcgcggcagaagcggacgtttggagttcagttcgcggatcaggaacgcctgtttgtcggcctcactccagctttcgtagtcgccgataccgaggtagcgggtcagctcgcccagcgcttcggtatgacgcgtgctctcctgacggatatcaatacggaccagcggtacgccgaaacatttcacgcggcgcagggtgtcgagcagatcgccgttggcgataatacccatgccacacgcctgaagactctggtagcaagcgtagagcggttcccacagttcttcgttttgtgtcagcaggccttctggttttggcagttcttcgcctttcaggcgcgcttccagccatgcctgtgtcgccatcaggcgagaacgcaggtttttcatcagatagcgatacggttctgcggcaccttcttcgccaaccagcgccagcagttcaggggtcgcttcaaccatgctcagttcagaaaccagcacctgaatatctttcaggaacaaatcggtggctttccagcggctgagtagcaggacgtggcgggtgatatcggcagtgacgttcgggttgccgtcgcggtcgccgcccatccagctagtaaaacggaccggaacaaattcgacgggcagtttgtagccgaggttctcttccagttgttcgttcagttcgcgcaggtaatttggtacgccttgccacaggctgttttccactacggcaaagccccatttggcttcatctaccgggcttggacgcagcttacggatttcatcggtatgccaactctgggcgatcaactggcgcaggcgacgcatcagctggttgtgttcgtagtcagcgatatctttgttatcgagctgttttaaacaggcgttcacttccaccattttgtggatcagtgtacgacgggtaatttcggttgggtgagccgtgaggaccagttccaggctcaggctttccactgcttttttgatggtgtcttcgctcagttccggctggtttttcagtttacgcagggtgcgggcgatcacttccgggttgctggcagcttcgcctttcgggctaatgctgtggtattgctcggcggtgttggccaggttcaggaactgactaaacgcacgcgcaacgggcagcagctcgtcgttgctcaaattttgtaaggtggtgagcaactcctggcggttagcatcattgccagcgcgactagatttgctcaacttacggatagtttctacgcgttcaagaatgtgttctcccaacgcatccttgatggtttctcccagcactttgccgagcatactgacattactacgcaatgcggaatattgttcgttcatattaccccagacaccccatcttatcgtttgatagccctgtatccttcacgtcgcattggcgcgaatatgctcgggctttgcttttcgtcgtcttttataaagccacgtaaaagcggtgacgtcaaatgctgcgaaatcgcttcagcaaacgaataaatagcaggaatttacgtcattaaattcacgacgctttaaataagcgtaacttatggaaatgttaaaaaatcgccccaagtaacaccaaaggtgtaggtcggataagatgcgcaagtatcgcatccgacattattgcggcactggagtttggcaacagtgccggatgcggcgcgagcgccttatccggcctacagttgggcatcgtttgagtcactgtcggtcggataagatgcgcaagtatcgcatccgacattattgcggcactggagtttggcaacagtgccggatgcggcgcgagcgccttatccggcctacggttgggcatcgtttgagtcactgtaggtcggataagatgcgcaagcatcgcatccgacattattgcggcactggagtttggcaacagcgccggatgcggcgcgagcgccttatccggcctacgttttaatgccagcaaaaatggtgaattacctgggttatcagttcgcgggtgggcttgataaaccgtgtttccagatattcatcaggttgatgagcctgattaatactgccaggccccaacaccagcgtcgggcataacgtttgaataaacggcgcttcggtacagtagttcaccacttcggtttttgctccgagcaatttctcaaccacttcaaccagttgatgattcggtgggcattcatagccagggatcggcggatgcagctcgtcgaccgtcagacgacccggccagcgttcgctcaccggagccaatgcatcgttgagcaaaccattaagttcattgagtgtcatgccaggcagcggacgaatatccatatgcaactcacagcaagcgcaaatacggttagaagcgtcgccaccgtgaatatgcccgaggttgagcgtagggtatggcacggtaaacgcttcgtagtgataacgttctttcaggttatcgcgcaattgcaaaatatgcccgatggcgtcgtgcattagttcgatagcgttaactccgcgtgctggatcgctggagtgcccgctctggccctgaatacggatggcgttagagatatgacctttatgtgcgcgtaccggttgtagactcgtcggttcgccaatgatggcgcaatccgggcgcagggcggtagtttcggcaaaataacgcgctccggccatactggtttcttcatcagcagtcgccagaatgtagagcggttttttcagtttcgtgacgtcgacatcgcgtagcgcatcaaggataaacgcaaaaaagcctttcatgtcggcggtgcctaagccgtaaagcttgccgtcatgctccgtcagtgtaaacggatcgcgcgtccagcgaccgtcatcaaatggcaccgtatcggtatgccccgccagcaacaagccgccagccccctgtccgatacttgccagcatattgaatttgttgcgagttcctggaacaggctgcacttccacattgaagcccaaatctttaaaccagtccgccagcagagtgattaaatctgcattgctttgatcgagtgcctcttccgtggcgcttatactaggtgtggcaatcagagcgcggtaaatctcgataaatggcggtaatttgtttttcattgttgacacacctctggtcatgatagtatcaatattcatgcagtatttatgaataaaaatacactaacgttgagcgtaataaaacccaccagccgtaaggtgaatgttttacgtttaacctggcaaccagacataagaaggtgaatagccccgatgttgaatacgctgattgtgggtgccagcggctacgctggcgcagagctagtgacctatgtaaatcgccatccgcatatgaacataaccgctttgactgttagtgcgcaaagcaatgatgcgggaaagttaatctccgatttgcatccgcagctaaaaggcatcgttgatctgccgttgcagccgatgagcgatatcagcgagtttagcccaggggtggacgtagtgtttctcgccaccgcccatgaagttagccacgatttagcgccgcagtttcttgaagcgggctgcgtggtgttcgacctttccggcgcgtttcgtgttaacgacgccaccttctatgaaaaatattacggctttacccatcaatacccggaactgttggaacaggcagcctacggtctggcggagtggtgcggtaataaattaaaagaagcgaatttgattgcggtgccgggctgttatccgacggcggcacagctggcgctgaaaccgttgattgatgccgatcttcttgacctcaatcagtggccggtgatcaacgccaccagcggcgtgagcggtgcagggcgtaaagcggccattagtaacagcttttgtgaagttagcctgcaaccgtatggcgtctttactcatcgccatcaaccagagatcgccacacacctcggtgctgacgttatcttcaccccacatctgggcaatttcccgcgcggcattctcgaaaccattacctgccgcctgaaaagcggtgtgacccaggcgcaagtcgcgcaagtgttacagcaggcgtatgcccataaaccgctggtgcggctgtatgacaaaggcgttccggcgctgaaaaatgtcgttgggctgccattttgcgatatcgggtttgccgttcagggcgagcatctgattattgtggcgaccgaagacaacttactgaaaggcgcggcggcacaagcggtacagtgcgccaatattcgtttcggctatgcggaaacgcagtctcttatttaagggtgcaatgatgaatccattaattatcaaactgggcggcgtactgctggatagtgaagaggcgctggaacgtctgtttagcgcactggtgaattatcgtgagagtcatcagcgtccgctggtgattgtgcacggcggcggttgcgtggtggatgagctgatgaaagggctgaatctgccggtgaaaaagaaaaacggcctgcgggtgacgcctgctgatcagatagacattatcaccggagcactggcgggaacggcaaataaaaccctgttggcatgggcgaagaaacatcagattgcggccgtaggtttgtttctcggtgacggcgacagcgtcaaagtgacccagcttgatgaagagttaggtcatgttggactggcgcagccaggtagccctaagcttatcaactccttgctggagaacggttatctgccggtggtcagctccattggcgtaacagacgaagggcaactgatgaacgtcaatgccgaccaggcggcaacggcgctggcggcaacgctgggcgcggatctgattttgctctccgacgtcagcggcattctcgacggcaaagggcaacgcattgccgaaatgaccgccgcgaaagcagaacaactgattgagcagggcattattactgacggcatgatagtgaaagtgaacgcggcgctggatgcggcccgcacgctgggccgtccggtagatatcgcctcctggcgtcatgcggagcagcttccggcactgtttaacggtatgccgatgggtacgcggattttagcttaagttttgttggccggaggcgcagctttccggcattgaatttcaaaataaggaaacagagttatggcactttggggcgggcgttttacccaggcagcagatcaacggttcaaacaattcaacgacagtctgcgctttgattaccgtctggcggagcaggatattgttggctctgtggcctggtccaaagccctggtcacggtaggcgtgttaaccgcagaagagcaggcgcaactggaagaggcgctgaacgtgttgctggaagatgttcgcgccaggccacaacaaatccttgaaagcgacgccgaagatatccatagctgggtggaaggcaaactgatcgacaaagtgggccagttaggcaaaaagctgcataccgggcgtagccgtaatgatcaggtagcgactgacctgaaactgtggtgcaaagataccgttagcgagttactgacggctaaccggcagctgcaaagcgcgctggtggaaaccgcacaaaacaatcaggacgcggtaatgccaggttacactcacctgcaacgcgcccagccggtgacgttcgcgcactggtgcctggcctatgttgagatgctggcgcgtgatgaaagccgtttgcaggatgcgcttaagcgtctggatgtcagcccgctaggctgtggcgcgctggcgggaacggcctatgaaatcgaccgtgaacagttagcaggctggctgggctttgctagcgcgacccgtaacagtctcgacagcgtttctgaccgtgaccatgtgttggaactgctttctgctgccgctatcggcatggtgcatctgagccgttttgctgaagatctgattttctttaacaccggcgaagcggggtttgtggagctttctgaccgcgtgacttccggtagtagtttaatgccgcagaagaaaaacccggatgcgctggagctgattcgcggtaaatgcggccgggtgcagggggcgttaaccggcatgatgatgacgctgaaaggtttgccgctggcttacaacaaagatatgcaggaagacaaagaaggtctgttcgacgcgctcgatacctggctggactgcctgcatatggcggcgctggtgctggacggcattcaggtgaaacgtccacgttgccaggaagcggctcagcagggttacgccaacgccaccgaactggcggattatctggtggcgaaaggcgtaccgttccgcgaggcgcaccatattgttggtgaagcggtggtggaagccattcgtcagggcaaaccgctggaagatctgccgctcagtgagttgcagaaattcagtcaggtgattgacgaagatgtctatccgattctgagcctgcaaagctgcctcgacaagcgtgcggcaaaaggcggcgtcagtccgcagcaggtggcgcaggcgattgcttttgcgcaggctcggttagggtaagaacatttatatgtataaatttgagcctggcttatcgccgggcttttttatggcaaaaaaaagcggatcctggagatccgcaaaagttcacgttggctttagttattcgagttgagaaactctcgaaacgggcagtgacttcaagggttaaaagaggtgccgctccgtttctgtgagcaattatcagtcagaatgcttgatagggataatcgttcattgctattctacctatcgccatgaactatcgtggcgatggaggatggataatgaatattcgtgatcttgagtacctggtggcattggctgaacaccgccattttcggcgtgcggcagattcctgccacgttagccagccgacgcttagcgggcaaattcgtaagctggaagatgagctgggcgtgatgttgctggagcggaccagccgtaaagtgttgttcacccaggcgggaatgctgctggtggatcaggcgcgtaccgtgctgcgtgaggtgaaagtccttaaagagatggcaagccagcagggcgagacgatgtccggaccgctgcacattggtttgattcccacagttggaccgtacctgctaccgcatattatccctatgctgcaccagacctttccaaagctggaaatgtatctgcatgaagcacagacccaccagttactggcgcaactggacagcggcaaactcgattgcgtgatcctcgcgctggtgaaagagagcgaagcattcattgaagtgccgttgtttgatgagccaatgttgctggctatctatgaagatcacccgtgggcgaaccgcgaatgcgtaccgatggccgatctggcaggggaaaaactgctgatgctggaagatggtcactgtttgcgcgatcaggcaatgggtttctgttttgaagccggggcggatgaagatacacacttccgcgcgaccagcctggaaactctgcgcaacatggtggcggcaggtagcgggatcactttactgccagcgctggctgtgccgccggagcgcaaacgcgatggggttgtttatctgccgtgcattaagccggaaccacgccgcactattggcctggtttatcgtcctggcagtccgctgcgcagccgctatgagcagctggcagaggccatccgcgcaagaatggatggccatttcgataaagttttaaaacaggcggtttaaaccgtttaacgcagctacccgataggcttccgccatcgtcgggtagttaaaggtggtgttgacgaagtactcaatagtgttgccgccacctttctgttccataatcgcctgaccgatatgaataatttcggcagcgcgctcgccaaagcagtgaatacccagaatctcttttgtttcccgatggaacaaaattttcagcgtgcccacgttcatgccgacgatttgtgcgcgtgccagatgtttaaactgggcgcggcccacttcatatggcactttcattgcggtcagctgctgttcggttttgcccacagagctgatttccgggatggtgtaaataccggtagggatatcttcaatcagatgtgcggtggcttcgccttttaccagcgcctgcgcggcaatgcgcccctggtcataggccgcgctcgccaggctcggataaccaatcacgtcgcccaccgcgtaaacgtgtggctgtgcggtctgatacatgctgttgaccttcagctgtccgcggctgtcagtttctagcccaatgttctgtaacgccaggctatcggtattaccggtgcgaccgttggcatagagcaggcagtcagctttcagttttttaccgctcttcagatgcatgatcacaccatcgtcacagccttcgatcttctcgtactcttcgttgtgacgaatcactacgccactgttccagaagtgataggagagagaatcactcatctcttgatcgagaaatgccagcaggcgatcgcgggtgttgatcagatccacttttacatccataccgcggaagatgctcgcatattcacagccgatcactccagcaccatagataagtacatggcgcggttcgtggtgcatgctgagaatactgtcgctgtcgtaaatgcgtggatgggtgaaatcaacatctgttggatgatatggacgagagccgcaggcaataacaaatttttcagcggttagtgtttcaacgctgccgtccgggcaatccagcgccaacgtatgctcgtcaacaaagcgagcgtttccctgcaatatttcacagtgattacgttcgtaaaatccctgacgcatgcgcgtttgttgattaatcacgttatcggcatggttaaggatatcggcaaaagaagagcggagcagtcgggaatggtcgctgtaaagtgggttttgattgaattctataatgcggctgacggcgtgacggagagctttgctcgggatggtgccccagtgggtgcaaccgccgccaacattttgataacgctcgataactgcgacgcgcgcaccttgcttaaccaggcccattgcagcgccttcgccgccggggccggaacctattactatggcatcgtaatcgtaggaatgtggcatggtagggcttacctgttcttatacataaaagcaacagaatggtaacattttatcgcgggtaagccaattgatccccgtcatttatctggctatatcctgagcggcctttgctttgtctgtttcttacttttgccctgacgttttattggatttttatcgacgatactctccgtttaagcggcaggtttccgctgtacgtaaaagaaccggccaaagaattgcagtaaatatgttttattgcgttaccgttcattcacaatactggagcaatccagtatgttcattctctggtatagtgccagcagtacttttggcaaggatagtgacatcgtgatgggcgtaagagcgcaacaaaaagaaaaaacccgccgtagcctggtggaagccgcatttagccaattaagtgctgaacgcagcttcgccagcctgagtttgcgtgaagtggcgcgtgaagcgggcattgctcccacctctttttatcggcatttccgcgacgtagacgaactgggtctgaccatggttgatgagagcggtttaatgctacgccaactcatgcgccaggcgcgtcagcgtatcgccaaaggcgggagtgtgatccgcaccagcgtctccacatttatggagttcatcggtaataatcctaacgccttccggttattattgcgggaacgctccggcacctccgctgcgtttcgtgccgccgttgcgcgtgaaattcagcacttcattgcggaacttgcggactatctggaactcgaaaaccatatgccgcgtgcgtttactgaagcgcaagccgaagcaatggtgacaattgtcttcagtgcgggtgccgaggcgttggacgtcggcgtcgaacaacgtcggcaattagaagagcgactggtactgcaactgcgaatgattagcaaaggggcttattactggtatcgccgtgaacaagagaaaaccgcaattattccgggaaatgtgaaggacgagtaatgaaacaagcaaatcaagatagaggtacgctgctgctggcgttagttgctggcttaagcattaatggtactttcgcagcgctgtttagctccattgtgccattttctgtattcccgattatttccctggtgctgacggtttactgcctgcatcaacgttatcttaatcgcactatgccggtaggcttgccgggtctggcagctgcctgttttattctcggcgtactgctgtacagcacggtagttcgtgcggaatatccggatatcggctctaacttcttcccggcagtactctccgtcattatggtgttctggattggcgcgaagatgcgtaaccgtaagcaggaagttgctgagtaatcggtattatgccggatgctggcgcatccggcatgggttttacttcgcggtcagtaatacgccgcactccatatggtgcgtgtaggggaactgatcaaacagagccagacgttcgaccttgtgcgtctggcttaatgtttccagattcttgcataacgtttccgggttacaggagatgtacaaaatacgcggatacgcctgcaccattttctcggtttcactgtccagaccgctgcgcggagggtcgacaaaaatggtttcgcactgataactctttaagtcgatcccttgcaggcggttaaactcgcgcacaccattcatcgcctgagtaaattcttctgccgccatacgaataatttgtacgttatcaatatggttagctgcgatgttgtattgcgcagcagcaacgctcggcttagcgatttcggtggctaatacccgatcaaaattacgcgccagcgctaaactaaagttaccgttgccgcagtacagctccagtaaatcgcctttactgcctttggttacgtccagcgcccattccagcatctgaatattcatcgccgcgttcggctgggtaaagctgttttctacctgacggtagatcatctctttccctgcgaccggcagacgttcatcgatgtaatcctgatccagctcgattttggttttcgttgcccgaccaatcagatgcacattcagattctgcgcgcgcagtgcatcgcgcagggcctccgcttcctgacgccactcatcatccagcttcttatggtatagcagggaaaccaccgcctgattactcagtgtagtgaggtaatcaatctggaacaacttgtggcgcagaacgggattattacgcacacccgcaatcatcgccgtcatcaactggttgataagttcactggcggcggggaagctatccacgcggatgcggcttttggtttgttgatcgaaaatgatgtgatacaggtcatcgccatcgtgccagatgcggaactccgcgcgcatccggtaatgactgaccgggctgcgaaacacttccggaaccaggtcagaaaacggtgccatcatactttgcaaacgtaccactttttcggctaactgcgcttcatactgttctgttggaaggtgttcgggggtcatgatgtatcctgaaaaattaaagtacgcggcgattgtagggattgctcatcagatgtccagatcttgatgaattcctatttgtgagctacgtctggacagtaacttgttacaacctgtagcatccacttgccggtcctgtgagttaatagggaatccagtgcgaatctggagctgacgcgcagcggtaaggaaaggtgcgatgattgcgttatgcggacactgccattcggtgggaagtcatcatctcttagtatcttagatacccctccaagcccgaagacctgccggccaacgtcgcatctggttctcatcatcgcgtaatattgatgaaacctgcggcatccttcttctattgtggatgctttacaatgattaaaaaagctagcctgctgacggcgtgttccgtcacggcattttccgcttgggcacaggataccagcccggatactctcgtcgttactgctaaccgttttgaacagccgcgcagcactgtgcttgcaccaaccaccgttgtgacccgtcaggatatcgaccgctggcagagcaccagcgtcaatgatgtgctgcgccgtcttccgggcgtcgatatcacccaaaacggcggtagtggtcagctcagttctatttttattcgcggtacaaatgccagtcatgtgttggtgttaattgatggcgtacgcctgaatctggcgggggtgagtggttctgccgaccttagccagttccctattgcgcttgtccagcgtgttgaatatatccgtgggccgcgctccgctgtttatggttccgatgcaataggcggggtggtgaatatcatcacgacgcgcgatgaacccggaacggaaattagtgcagggtggggaagcaatagttatcagaactatgatgtctctacgcagcaacaactgggggataagacacgggtaacgctgttgggcgattatgcccatactcatggttatgatgttgttgcctatggtaataccggaacgcaagcgcagacagataacgatggttttttaagtaaaacgctttatggcgcgctggagcataactttactgatgcctggagcggctttgtgcgcggctatggctatgataaccgtaccaattatgacgcgtattattctcccggtagtccgttgctcgatacccgtaaactctatagccaaagttgggacgccgggctgcgctataacggcgaactgattaaaagtcaactcattaccagctatagccatagcaaagattacaactacgatccccattatggtcgttatgatagcagcgcgacgctcgatgagatgaagcaatacaccgtccagtgggcaaacaatgtcatcgttggtcacggtagtattggtgcgggtgtcgactggcagaaacagactacgacgccgggtacaggttatgttgaggatggatatgatcaacgtaataccggcatctatctgaccgggctgcaacaagtcggcgattttacctttgaaggcgcagcacgcagtgacgataacagtcagtttggtcgtcatggaacctggcaaaccagcgccggttgggaattcatcgaaggttatcgcttcattgcttcctacgggacatcttataaggcaccaaatctggggcaactgtatggcttctacggaaatccgaatctggacccggagaaaagcaaacagtgggaaggcgcgtttgaaggcttaaccgctggggtgaactggcgtatttccggatatcgtaacgatgtcagtgacttgatcgattatgatgatcacaccctgaaatattacaacgaagggaaagcgcggattaagggcgtcgaggcgaccgccaattttgataccggaccactgacgcatactgtgagttatgattatgtcgatgcgcgcaatgcgattaccgacacgccgttgttacgccgtgctaaacagcaggtgaaataccagctcgactggcagttgtatgacttcgactggggtattacttatcagtatttaggcactcgctatgataaggattacagttcttatccttatcaaaccgttaaaatgggcggtgtgagcttgtgggatcttgcggttgcgtatccggtcacctctcacctgacagttcgtggtaaaatagccaacctgttcgacaaagattatgagacagtctatggctaccaaactgcaggacgggaatacaccttgtctggcagctacaccttctgaaccacgtcccaccgtgctggtgtttgactccggcgtcggtgggttgagcgtctatgacgagatccggcatctcttaccggatctccattacatttatgctttcgataacgtcgctttcccgtatggcgaaaaaagcgaagcgtttattgttgagcgagtggtggcaattgtcaccgcggtgcaagaacgttatccccttgcgctggctgtggtcgcttgcaacactgccagtaccgttagtcttcctgcattacgcgaaaagttcgacttcccggttgttggtgtcgtgccggcgattaaacctgctgcacgtctgacggcaaatggcattgtcggattactggcaacccgcggaacagttaaacgttcttatactcatgagctgatcgcgcgtttcgctaatgaatgccagatagaaatgctgggcagcgcagagatggttgagttggctgaagcgaagctacatggcgaagatgtttctctggatgcactaaaacgtatcctacgcccgtggttaagaatgaaagagccgccagataccgttgtattgggttgcacccatttccctctactacaagaagaactgttacaagtgctgccagagggaacccggctggtggattctggcgcagcgattgctcgccgaacggcctggttgttagaacatgaagccccggatgcaaaatctgccgatgcgaatattgccttttgtatggcaatgacgccaggagctgaacaattattgcccgttttacagcgttacggcttcgaaacgctcgaaaaactggcagttttaggctgatttggttgaatgttgcgcggtcagaaaattattttaaatttcctcttgtcaggccggaataactccccataatgcgccaccactgacacggaacaacggcaaacacgccgccgggtcagcggggttctcctgagaactccggcagagaaagcaaaaataaatgcttgactctgtagcgggaaggcgtattatgcacaccccgcgccgctgagaaaaagcgaagcggcactgctctttaacaatttatcagacaatctgtgtgggcactcgaagatacggattcttaacgtcgcaagacgaaaaatgaataccaagtctcaagagtgaacacgtaattcattacgaagtttaattctttgagcgtcaaacttttaaattgaagagtttgatcatggctcagattgaacgctggcggcaggcctaacacatgcaagtcgaacggtaacaggaagaagcttgcttctttgctgacgagtggcggacgggtgagtaatgtctgggaaactgcctgatggagggggataactactggaaacggtagctaataccgcataacgtcgcaagaccaaagagggggaccttcgggcctcttgccatcggatgtgcccagatgggattagctagtaggtggggtaacggctcacctaggcgacgatccctagctggtctgagaggatgaccagccacactggaactgagacacggtccagactcctacgggaggcagcagtggggaatattgcacaatgggcgcaagcctgatgcagccatgccgcgtgtatgaagaaggccttcgggttgtaaagtactttcagcggggaggaagggagtaaagttaatacctttgctcattgacgttacccgcagaagaagcaccggctaactccgtgccagcagccgcggtaatacggagggtgcaagcgttaatcggaattactgggcgtaaagcgcacgcaggcggtttgttaagtcagatgtgaaatccccgggctcaacctgggaactgcatctgatactggcaagcttgagtctcgtagaggggggtagaattccaggtgtagcggtgaaatgcgtagagatctggaggaataccggtggcgaaggcggccccctggacgaagactgacgctcaggtgcgaaagcgtggggagcaaacaggattagataccctggtagtccacgccgtaaacgatgtcgacttggaggttgtgcccttgaggcgtggcttccggagctaacgcgttaagtcgaccgcctggggagtacggccgcaaggttaaaactcaaatgaattgacgggggcccgcacaagcggtggagcatgtggtttaattcgatgcaacgcgaagaaccttacctggtcttgacatccacggaagttttcagagatgagaatgtgccttcgggaaccgtgagacaggtgctgcatggctgtcgtcagctcgtgttgtgaaatgttgggttaagtcccgcaacgagcgcaacccttatcctttgttgccagcggtccggccgggaactcaaaggagactgccagtgataaactggaggaaggtggggatgacgtcaagtcatcatggcccttacgaccagggctacacacgtgctacaatggcgcatacaaagagaagcgacctcgcgagagcaagcggacctcataaagtgcgtcgtagtccggattggagtctgcaactcgactccatgaagtcggaatcgctagtaatcgtggatcagaatgccacggtgaatacgttcccgggccttgtacacaccgcccgtcacaccatgggagtgggttgcaaaagaagtaggtagcttaaccttcgggagggcgcttaccactttgtgattcatgactggggtgaagtcgtaacaaggtaaccgtaggggaacctgcggttggatcacctccttaccttaaagaagcgtactttgtagtgctcacacagattgtctgatagaaagtgaaaagcaaggcgtttacgcgttgggagtgaggctgaagagaataaggccgttcgctttctattaatgaaagctcaccctacacgaaaatatcacgcaacgcgtgataagcaattttcgtgtccccttcgtctagaggcccaggacaccgccctttcacggcggtaacaggggttcgaatcccctaggggacgccacttgctggtttgtgagtgaaagtcgccgaccttaatatctcaaaactcatcttcgggtgatgtttgagatatttgctctttaaaaatctggatcaagctgaaaattgaaacactgaacaacgagagttgttcgtgagtctctcaaattttcgcaacacgatgatgaatcgaaagaaacatcttcgggttgtgaggttaagcgactaagcgtacacggtggatgccctggcagtcagaggcgatgaaggacgtgctaatctgcgataagcgtcggtaaggtgatatgaaccgttataaccggcgatttccgaatggggaaacccagtgtgtttcgacacactatcattaactgaatccataggttaatgaggcgaaccgggggaactgaaacatctaagtaccccgaggaaaagaaatcaaccgagattcccccagtagcggcgagcgaacggggagcagcccagagcctgaatcagtgtgtgtgttagtggaagcgtctggaaaggcgcgcgatacagggtgacagccccgtacacaaaaatgcacatgctgtgagctcgatgagtagggcgggacacgtggtatcctgtctgaatatggggggaccatcctccaaggctaaatactcctgactgaccgatagtgaaccagtaccgtgagggaaaggcgaaaagaaccccggcgaggggagtgaaaaagaacctgaaaccgtgtacgtacaagcagtgggagcacgcttaggcgtgtgactgcgtaccttttgtataatgggtcagcgacttatattctgtagcaaggttaaccgaataggggagccgaagggaaaccgagtcttaactgggcgttaagttgcagggtatagacccgaaacccggtgatctagccatgggcaggttgaaggttgggtaacactaactggaggaccgaaccgactaatgttgaaaaattagcggatgacttgtggctgggggtgaaaggccaatcaaaccgggagatagctggttctccccgaaagctatttaggtagcgcctcgtgaattcatctccgggggtagagcactgtttcggcaagggggtcatcccgacttaccaacccgatgcaaactgcgaataccggagaatgttatcacgggagacacacggcgggtgctaacgtccgtcgtgaagagggaaacaacccagaccgccagctaaggtcccaaagtcatggttaagtgggaaacgatgtgggaaggcccagacagccaggatgttggcttagaagcagccatcatttaaagaaagcgtaatagctcactggtcgagtcggcctgcgcggaagatgtaacggggctaaaccatgcaccgaagctgcggcagcgacgcttatgcgttgttgggtaggggagcgttctgtaagcctgcgaaggtgtgctgtgaggcatgctggaggtatcagaagtgcgaatgctgacataagtaacgataaagcgggtgaaaagcccgctcgccggaagaccaagggttcctgtccaacgttaatcggggcagggtgagtcgacccctaaggcgaggccgaaaggcgtagtcgatgggaaacaggttaatattcctgtacttggtgttactgcgaaggggggacggagaaggctatgttggccgggcgacggttgtcccggtttaagcgtgtaggctggttttccaggcaaatccggaaaatcaaggctgaggcgtgatgacgaggcactacggtgctgaagcaacaaatgccctgcttccaggaaaagcctctaagcatcaggtaacatcaaatcgtaccccaaaccgacacaggtggtcaggtagagaataccaaggcgcttgagagaactcgggtgaaggaactaggcaaaatggtgccgtaacttcgggagaaggcacgctgatatgtaggtgaggtccctcgcggatggagctgaaatcagtcgaagataccagctggctgcaactgtttattaaaaacacagcactgtgcaaacacgaaagtggacgtatacggtgtgacgcctgcccggtgccggaaggttaattgatggggttagcgcaagcgaagctcttgatcgaagccccggtaaacggcggccgtaactataacggtcctaaggtagcgaaattccttgtcgggtaagttccgacctgcacgaatggcgtaatgatggccaggctgtctccacccgagactcagtgaaattgaactcgctgtgaagatgcagtgtacccgcggcaagacggaaagaccccgtgaacctttactatagcttgacactgaacattgagccttgatgtgtaggataggtgggaggctttgaagtgtggacgccagtctgcatggagccgaccttgaaataccaccctttaatgtttgatgttctaacgttgacccgtaatccgggttgcggacagtgtctggtgggtagtttgactggggcggtctcctcctaaagagtaacggaggagcacgaaggttggctaatcctggtcggacatcaggaggttagtgcaatggcataagccagcttgactgcgagcgtgacggcgcgagcaggtgcgaaagcaggtcatagtgatccggtggttctgaatggaagggccatcgctcaacggataaaaggtactccggggataacaggctgataccgcccaagagttcatatcgacggcggtgtttggcacctcgatgtcggctcatcacatcctggggctgaagtaggtcccaagggtatggctgttcgccatttaaagtggtacgcgagctgggtttagaacgtcgtgagacagttcggtccctatctgccgtgggcgctggagaactgaggggggctgctcctagtacgagaggaccggagtggacgcatcactggtgttcgggttgtcatgccaatggcactgcccggtagctaaatgcggaagagataagtgctgaaagcatctaagcacgaaacttgccccgagatgagttctccctgaccctttaagggtcctgaaggaacgttgaagacgacgacgttgataggccgggtgtgtaagcgcagcgatgcgttgagctaaccggtactaatgaaccgtgaggcttaaccttacaacgccgaagctgttttggcggatgagagaagattttcagcctgatacagattaaatcagaacgcagaagcggtctgataaaacagaatttgcctggcggcagtagcgcggtggtcccacctgaccccatgccgaactcagaagtgaaacgccgtagcgccgatggtagtgtggggtctccccatgcgagagtagggaactgccaggcatcaaataaaacgaaaggctcagtcgaaagactgggcctttcgttttatctgttgtttgtcggtgaacgctctcctgagtaggacaaatccgccgggagcggatttgaacgttgcgaagcaacggcccggagggtggcgggcaggacgcccgccataaactgccaggcatcaaattaagcagaaggccatcctgacggatggcctttttgcgtttctacaaactcttcctgtcgtcatatctacaagccatccccccacagatacggtaaactagcctcgtttttgcatcaggaaagcagctatgaaccactccttaaaaccctggaacacatttggcattgatcataatgctcagcacattgtatgtgccgaagacgaacaacaattactcaatgcctggcagtatgcaaccgcagaaggacaacccgttcttattctgggtgaaggaagtaatgtactttttctggaggactatcgcggcacggtgatcatcaaccggatcaaaggtatcgaaattcatgatgaacctgatgcgtggtatttacatgtaggagccggagaaaactggcatcgtctggtaaaatacactttgcaggaaggtatgcctggtctggaaaatctggcattaattcctggttgtgtcggcagtagtcctatccagaatattggtgcttatggcgtagaattacagcgagtttgcgcttatgttgattctgttgaactggcgacaggcaagcaagtgcgcttaactgccaaagagtgccgttttggctatcgcgacagtatttttaaacatgaataccaggaccgcttcgctattgtagccgtaggtctgcgtctgccaaaagagtggcaacctgtactaacgtatggtgacttaactcgtctggatcctacaacagtaacgccacagcaagtatttaatgcggtgtgtcatatgcgcaccaccaaactccctgatccaaaagtgaatggcaatgccggtagtttcttcaaaaaccctgttgtatctgccgaaacggctaaagcattactgagtcaatttccaacagcaccaaattacccccaggcggatggtagtgtaaaactggcagcaggttggcttatcgatcagtgccagctaaaagggatgcaaataggtggggctgcggtgcaccgtcaacaggcgttagttctcattaatgaagacaatgcaaaaagcgaagatgttgtacagctggcgcatcatgtaagacagaaagttggtgaaaaatttaatgtctggcttgagcctgaagtccgctttattggtgcaagtggtgaagtgagcgcagtggagacaattagttgaaataaagcgcagtggagacaatttcatgaaggataacaccgtgccactgaaattgattgccctgttagcgaacggtgaatttcactctggcgagcagttgggtgaaacgctgggaatgagccgggcggctattaataaacacattcagacactgcgtgactggggcgttgatgtctttaccgttccgggtaaaggatacagcctgcctgagcctatccagttacttaatgctaaacagatattgggtcagctggatggcggtagtgtagccgtgctgccagtgattgactccacgaatcagtaccttcttgatcgtatcggagagcttaaaagcggcgatgcttgcattgcagaataccagcaggctggccgtggtcgccggggtcggaaatggtttagcccttttggcgcaaacttatatttgagcatgttctggcgtctggaacaaggcccggcggcggcgattggtttaagtctggttatcggtatcgtgatggcggaagtattacgcaagctgggtgcagataaagttcgtgttaaatggcctaatgacctctatctgcaggatcgcaagctggcaggcattctggtggagctgactggcaaaactggcgatgcggcgcaaatagtcattggagccgggatcaacatggcaatgcgccgtgttgaagagagtgtcgttaatcaggggtggatcacgctgcaggaagcggggatcaatctcgatcgtaatacgttggcggccatgctaatacgtgaattacgtgctgcgttggaactcttcgaacaagaaggattggcaccttatctgagccgctgggaaaagctggataattttattaatcgcccagtgaaacttatcattggtgataaagaaatatttggcattagtcgcggaatagacaaacagggggctttattacttgagcaggatggaataataaaaccctggatgggcggtgaaatatccctgcgtagtgcagaaaaataagaaaggggagtattcgctcccctgcaaattatttgcgtagtctgacctcttctaccgcatgattagcacttttcgtcaggattaaactggcgcgctcacgagtaggtagaatattttgctttaagttcagccagttgatctctttccacaatgtcatggcagtcttaatcgcttcttctttagttaatttcgcgtagttatgaaaataggaatccgggtcggtaaaagccccttcgcggaatttcagaaaacggttgatataccatgtctgaagtaagtcttccggtgcatcaacatatatgctaaaatcgacaaaatcagaaacaaatacatgatgtggatcgtgtggataatccatcccgctctgtaagacatttaacccttcaagaattaaaatatcaggctgaacaaccgttttatctccatccgggatcacatcataaataagatgactgtaaacaggtgctgtaacgtttggcacgccggatttgagatcggaaacaaacttcaccaggcgatgcatatcatagctttccgggaagcctttcttcttcatcagaccacgttctttcagaacctgattagggtgaaggaagccatctgtagtgatcagttcaacacgacgatgttccggccaacggcttaatagcgcctgcaatacacgggcggttgtacttttccccaccgcgacactgccagcaatactgataatgtaaggaatgcgttgcccgttggtaccaagaaactgttccagaactgcctgacggcgcagattgctgcttatatagaagttcagcaaacgactcaaaggtaaatagatctcggcaacttcttctaagctgagatcttcattaatacctttgagacgggcgatctcatcttcgcttaacgtcataggtacggaatcacgcagagctgcccactggttgcggtcaaactgtaggtaaggcgtcattaacgtttgctcttttatactcataagcatgtttctggcggtcatagctctatcggcaaagcgatatttgccatggcgcgtcacagttctgttgaatgggttaatgggcaggagggtaacaccagatggggaggaataataagaaaaaatctctgccaggaagctatcgttgaaaagcaatgtgacagatattccatctgataaaaagaattatggtttagcaggagcgcattgttgagcacaatgatgttgaaaaagtgtgctaatctgccctccgttcggctgtttcttcatcgtgtcgcataaaatgtgaccaataaaacaaattatgcaattttttagttgcatgaactcgcatgtctccatagaatgcgcgctacttgatgccgacttagctcagtaggtagagcaactgacttgtaatcagtaggtcaccagttcgattccggtagtcggcaccatcaagtccggtggggttcccgagcggccaaagggagcagactgtaaatctgccgtcacagacttcgaaggttcgaatccttcccccaccaccaatttcggccacgcgatggcgtagcccgagacgataagttcgcttaccggctcgaataaagagagcttctctcgatattcagtgcagaatgaaaatcaggtagccgagttccaggatgcgggcatcgtataatggctattacctcagccttccaagctgatgatgcgggttcgattcccgctgcccgctccaagatgtgctgatatagctcagttggtagagcgcacccttggtaagggtgaggtcggcagttcgaatctgcctatcagcaccacttcttttctcctccctgttttttccttctgtttattgcattcaacaagtcgggcatgttgcctggttgatgtggtgatatcaccgatttatccgtgtcttagagggacaatcgatgtctaaagaaaagtttgaacgtacaaaaccgcacgttaacgtcggtactatcggccacgttgaccatggtaaaacaacgctgaccgctgcaatcactaccgtactggctaaaacctacggcggtgctgctcgcgcattcgaccagatcgataacgcgccggaagaaaaagctcgtggtatcaccatcaacacttctcacgttgaatacgacaccccgacccgccactacgcacacgtagactgcccggggcacgccgactatgttaaaaacatgatcaccggtgctgcgcagatggacggcgcgatcctggtagttgctgcgactgacggcccgatgccgcagactcgtgagcacatcctgctgggtcgtcaggtaggcgttccgtacatcatcgtgttcctgaacaaatgcgacatggttgatgacgaagagctgctggaactggttgaaatggaagttcgtgaacttctgtctcagtacgacttcccgggcgacgacactccgatcgttcgtggttctgctctgaaagcgctggaaggcgacgcagagtgggaagcgaaaatcctggaactggctggcttcctggattcttacattccggaaccagagcgtgcgattgacaagccgttcctgctgccgatcgaagacgtattctccatctccggtcgtggtaccgttgttaccggtcgtgtagaacgcggtatcatcaaagttggtgaagaagttgaaatcgttggtatcaaagagactcagaagtctacctgtactggcgttgaaatgttccgcaaactgctggacgaaggccgtgctggtgagaacgtaggtgttctgctgcgtggtatcaaacgtgaagaaatcgaacgtggtcaggtactggctaagccgggcaccatcaagccgcacaccaagttcgaatctgaagtgtacattctgtccaaagatgaaggcggccgtcatactccgttcttcaaaggctaccgtccgcagttctacttccgtactactgacgtgactggtaccatcgaactgccggaaggcgtagagatggtaatgccgggcgacaacatcaaaatggttgttaccctgatccacccgatcgcgatggacgacggtctgcgtttcgcaatccgtgaaggcggccgtaccgttggcgcgggcgttgtagcaaaagttctgagctaattgccgataacatttgacgcaatgcgcactaaaagggcatcatttgatgccctttttgcacgctttcgtaccagaacctggctcatcagtgattttctttgtcataatcattgctgagacaggctctgttgagggcgtataatccgaaaagctaatacgcgtttcgatttggtttgcctcgcgatcgcggggtgaaaatgtttgtagaaaacttctgacaggttggtttatgagtgcgaataccgaagctcaaggaagcgggcgcggcctggaagcgatgaagtgggtcgttgtggtggcattgctcctggtggcgattgtcggcaactatctttatcgcgacattatgctgccgctgcgtgcgctggccgtagtaattctgattgctgcagcgggtggtgtcgcgctgttaacgacaaaaggtaaagctaccgttgcttttgcccgtgaagcgcgtaccgaagtccgtaaggtcatttggccgactcgccaggaaacattgcacaccacgctgattgtggctgcggttaccgcagtaatgagtctgatcctgtggggactggatggtattctggttcgcctggtatcctttatcactggcctgaggttctgagatgtctgaagctcctaaaaagcgctggtacgtcgttcaggcgttttccggttttgaaggccgcgtagcaacgagcctgcgtgagcatatcaaattacacaacatggaagatttgtttggtgaagtcatggtaccaaccgaagaagtggttgaaatccgtggcggtcagcgtcgcaaaagcgaacgtaaattcttccctggctacgtcctcgttcagatggtgatgaacgacgcgagctggcacctggtgcgcagcgtaccgcgtgtgatgggcttcatcggcggtacttccgatcgtcctgcgccaatcagcgataaagaagtcgatgcgattatgaaccgcctgcagcaggttggtgataagccgcgtccgaaaacgctgtttgaaccgggtgaaatggtccgtgttaatgatggtccgttcgctgacttcaacggtgttgttgaagaagtggattacgagaaatctcgtctgaaagtgtctgtttctatcttcggtcgtgcgaccccggtagagctggacttcagccaggttgaaaaagcctaacccagcgatcaaaaaagcggcgatttaatcgttgcacaaggcgtgagattggaatacaatttcgcgccttttgtttttatgggccttgcccgtaaaacgattttttatatcacggggagcctctcagaggcgttattacccaacttgaggaatttataatggctaagaaagtacaagcctatgtcaagctgcaggttgcagctggtatggctaacccgagtccgccagtaggtccggctctgggtcagcagggcgtaaacatcatggaattctgcaaagcgttcaacgcaaaaactgattccatcgaaaaaggtctgccgattccggtagtaatcaccgtttacgctgaccgttctttcactttcgttaccaagaccccgccggcagcagttctgctgaaaaaagcggctggtatcaagtctggttccggtaagccgaacaaagacaaagtgggtaaaatttcccgcgctcagctgcaggaaatcgcgcagaccaaagctgccgacatgactggtgccgacattgaagcgatgactcgctccatcgaaggtactgcacgttccatgggcctggtagtggaggactaagaaatggctaaactgaccaagcgcatgcgtgttatccgcgagaaagttgatgcaaccaaacagtacgacatcaacgaagctatcgcactgctgaaagagctggcgactgctaaattcgtagaaagcgtggacgtagctgttaacctcggcatcgacgctcgtaaatctgaccagaacgtacgtggtgcaactgtactgccgcacggtactggccgttccgttcgcgtagccgtatttacccaaggtgcaaacgctgaagctgctaaagctgcaggcgcagaactggtaggtatggaagatctggctgaccagatcaagaaaggcgaaatgaactttgacgttgttattgcttctccggatgcaatgcgcgttgttggccagctgggccaggttctgggtccgcgcggcctgatgccaaacccgaaagtgggtactgtaacaccgaacgttgctgaagcggttaaaaacgctaaagctggccaggttcgttaccgtaacgacaaaaacggcatcatccacaccaccatcggtaaagtggactttgacgctgacaaactgaaagaaaacctggaagctctgctggttgcgctgaaaaaagcaaaaccgactcaggcgaaaggcgtgtacatcaagaaagttagcatctccaccaccatgggtgcaggtgttgcagttgaccaggctggcctgagcgcttctgtaaactaatgcctttacgtgggcggtgattttgtctacaatcttacccccacgtataatgcttaatgcagacgtatatccgagatattcgggttgtggcaaggcggcaactgagtgagtcgccaggagcatagctaactatgtgactggtgcgaatgaaggaagccaacgccgtcacaagctgaatagcgacggatagaaaagatttgttcgttggagcctggcctatccaggcctccgtcgaagaccgcaggagtttcgcaagaaacttaatcccctgcgtagacggtgacagaacgctaagattattcttttatattctggcttgtttctgctcaccgtaattaagacgctctctccgtttggaggagtgaagtgagttccagagattttctctggcaaacatccaggagcaaagctaatggctttaaatcttcaagacaaacaagcgattgttgctgaagtcagcgaagtagccaaaggcgcgctgtctgcagtagttgcggattcccgtggcgtaactgtagataaaatgactgaactgcgtaaagcaggtcgcgaagctggcgtatacatgcgtgttgttcgtaacaccctgctgcgccgtgctgttgaaggtactccgttcgagtgcctgaaagacgcgtttgttggtccgaccctgattgcatactctatggaacacccgggcgctgctgctcgtctgttcaaagagttcgcgaaagcgaatgcaaaatttgaggtcaaagccgctgcctttgaaggtgagctgatcccggcgtctcagatcgaccgcctggcaactctgccgacctacgaagaagcaattgcacgcctgatggcaaccatgaaagaagctagcgctggcaaactggttcgtactctggctgctgtacgcgatgcgaaagaagctgcttaatcgcagttatctttttaacgcattcgcttacgtataaacttattctgatattcaggaacaatttaaatgtctatcactaaagatcaaatcattgaagcagttgcagctatgtctgtaatggacgttgtagaactgatctctgcaatggaagaaaaattcggtgtttccgctgctgctgctgtagctgtagctgctggcccggttgaagctgctgaagaaaaaactgaattcgacgtaattctgaaagctgctggcgctaacaaagttgctgttatcaaagcagtacgtggcgcaactggcctgggtctgaaagaagctaaagacctggtagaatctgcaccggctgctctgaaagaaggcgtgagcaaagacgacgcagaagcactgaaaaaagctctggaagaagctggcgctgaagttgaagttaaataagccaacccttccggttgcagcctgagaaatcaggctgatggctggtgactttttagtcaccagcctttttgcgctgtaaggcgccagtagcgtttcacactgtttgactactgctgtgcctttcaatgcttgtttctatcgacgacttaatatactgcgacaggacgtccgttctgtgtaaatcgcaatgaaatggtttaagcgtgatagcaacaggcattgcggaaagtgttccattttccggtcaacaaaatagtgttgcacaaactgtccgctcaatggacagatgggtcgacttgtcagcgagctgaggaaccctatggtttactcctataccgagaaaaaacgtattcgtaaggattttggtaaacgtccacaagttctggatgtaccttatctcctttctatccagcttgacagctttcagaaatttatcgagcaagatcctgaagggcagtatggtctggaagctgctttccgttccgtattcccgattcagagctacagcggtaattccgagctgcaatacgtcagctaccgccttggcgaaccggtgtttgacgtccaggaatgtcaaatccgtggcgtgacctattccgcaccgctgcgcgttaaactgcgtctggtgatctatgagcgcgaagcgccggaaggcaccgtaaaagacattaaagaacaagaagtctacatgggcgaaattccgctcatgacagacaacggtacctttgttatcaacggtactgagcgtgttatcgtttcccagctgcaccgtagtccgggcgtcttctttgactccgacaaaggtaaaacccactctagcggtaaagtgctgtataacgcgcgtatcatcccttaccgtggttcctggctggacttcgaattcgatccgaaggacaacctgttcgtacgtatcgaccgtcgccgtaaactgcctgcgaccatcattctgcgcgccctgaactacaccacagagcagatcctcgacctgttctttgaaaaagttatctttgaaatccgtgataacaagctgcagatggaactggtgccggaacgcctgcgtggtgaaaccgcatcttttgacatcgaagctaacggtaaagtgtacgtagaaaaaggccgccgtatcactgcgcgccacattcgccagctggaaaaagacgacgtcaaactgatcgaagtcccggttgagtacatcgcaggtaaagtggttgctaaagactatattgatgagtctaccggcgagctgatctgcgcagcgaacatggagctgagcctggatctgctggctaagctgagccagtctggtcacaagcgtatcgaaacgctgttcaccaacgatctggatcacggcccatatatctctgaaaccttacgtgtcgacccaactaacgaccgtctgagcgcactggtagaaatctaccgcatgatgcgccctggcgagccgccgactcgtgaagcagctgaaagcctgttcgagaacctgttcttctccgaagaccgttatgacttgtctgcggttggtcgtatgaagttcaaccgttctctgctgcgcgaagaaatcgaaggttccggtatcctgagcaaagacgacatcattgatgttatgaaaaagctcatcgatatccgtaacggtaaaggcgaagtcgatgatatcgaccacctcggcaaccgtcgtatccgttccgttggcgaaatggcggaaaaccagttccgcgttggcctggtacgtgtagagcgtgcggtgaaagagcgtctgtctctgggcgatctggataccctgatgccacaggatatgatcaacgccaagccgatttccgcagcagtgaaagagttcttcggttccagccagctgtctcagtttatggaccagaacaacccgctgtctgagattacgcacaaacgtcgtatctccgcactcggcccaggcggtctgacccgtgaacgtgcaggcttcgaagttcgagacgtacacccgactcactacggtcgcgtatgtccaatcgaaacccctgaaggtccgaacatcggtctgatcaactctctgtccgtgtacgcacagactaacgaatacggcttccttgagactccgtatcgtaaagtgaccgacggtgttgtaactgacgaaattcactacctgtctgctatcgaagaaggcaactacgttatcgcccaggcgaactccaacttggatgaagaaggccacttcgtagaagacctggtaacttgccgtagcaaaggcgaatccagcttgttcagccgcgaccaggttgactacatggacgtatccacccagcaggtggtatccgtcggtgcgtccctgatcccgttcctggaacacgatgacgccaaccgtgcattgatgggtgcgaacatgcaacgtcaggccgttccgactctgcgcgctgataagccgctggttggtactggtatggaacgtgctgttgccgttgactccggtgtaactgcggtagctaaacgtggtggtgtcgttcagtacgtggatgcttcccgtatcgttatcaaagttaacgaagacgagatgtatccgggtgaagcaggtatcgacatctacaacctgaccaaatacacccgttctaaccagaacacctgtatcaaccagatgccgtgtgtgtctctgggtgaaccggttgaacgtggcgacgtgctggcagacggtccgtccaccgacctcggtgaactggcgcttggtcagaacatgcgcgtagcgttcatgccgtggaatggttacaacttcgaagactccatcctcgtatccgagcgtgttgttcaggaagaccgtttcaccaccatccacattcaggaactggcgtgtgtgtcccgtgacaccaagctgggtccggaagagatcaccgctgacatcccgaacgtgggtgaagctgcgctctccaaactggatgaatccggtatcgtttacattggtgcggaagtgaccggtggcgacattctggttggtaaggtaacgccgaaaggtgaaactcagctgaccccagaagaaaaactgctgcgtgcgatcttcggtgagaaagcctctgacgttaaagactcttctctgcgcgtaccaaacggtgtatccggtacggttatcgacgttcaggtctttactcgcgatggcgtagaaaaagacaaacgtgcgctggaaatcgaagaaatgcagctcaaacaggcgaagaaagacctgtctgaagaactgcagatcctcgaagcgggtctgttcagccgtatccgtgctgtgctggtagccggtggcgttgaagctgagaagctcgacaaactgccgcgcgatcgctggctggagctgggcctgacagacgaagagaaacaaaatcagctggaacagctggctgagcagtatgacgaactgaaacacgagttcgagaagaaactcgaagcgaaacgccgcaaaatcacccagggcgacgatctggcaccgggcgtgctgaagattgttaaggtatatctggcggttaaacgccgtatccagcctggtgacaagatggcaggtcgtcacggtaacaagggtgtaatttctaagatcaacccgatcgaagatatgccttacgatgaaaacggtacgccggtagacatcgtactgaacccgctgggcgtaccgtctcgtatgaacatcggtcagatcctcgaaacccacctgggtatggctgcgaaaggtatcggcgacaagatcaacgccatgctgaaacagcagcaagaagtcgcgaaactgcgcgaattcatccagcgtgcgtacgatctgggcgctgacgttcgtcagaaagttgacctgagtaccttcagcgatgaagaagttatgcgtctggctgaaaacctgcgcaaaggtatgccaatcgcaacgccggtgttcgacggtgcgaaagaagcagaaattaaagagctgctgaaacttggcgacctgccgacttccggtcagatccgcctgtacgatggtcgcactggtgaacagttcgagcgtccggtaaccgttggttacatgtacatgctgaaactgaaccacctggtcgacgacaagatgcacgcgcgttccaccggttcttacagcctggttactcagcagccgctgggtggtaaggcacagttcggtggtcagcgtttcggggagatggaagtgtgggcgctggaagcatacggcgcagcatacaccctgcaggaaatgctcaccgttaagtctgatgacgtgaacggtcgtaccaagatgtataaaaacatcgtggacggcaaccatcagatggagccgggcatgccagaatccttcaacgtattgttgaaagagattcgtagcctgggtatcaacatcgaactggaagacgagtaattctcgctcaaacaggtcactgctgtcgggttaaaacccggcagcggattgtgctaactccgacgggagcaaatccgtgaaagatttattaaagtttctgaaagcgcagactaaaaccgaagagtttgatgcgatcaaaattgctctggctagcccagacatgatccgtagttggtctttcggtgaagttaaaaagccggaaaccatcaactaccgtacgttcaaaccagaacgtgacggccttttctgcgcccgtatctttgggccggtaaaagattacgagtgcctgtgcggtaagtacaagcgcctgaaacaccgtggcgtcatctgtgagaagtgcggcgttgaagtgacccagactaaagtacgccgtgagcgtatgggccacatcgaactggcttccccgactgcgcacatctggttcctgaaaagcctgccgtcccgtatcggtctgctgctcgatatgccgctgcgcgatatcgaacgcgtactgtactttgaatcctatgtggttatcgaaggcggtatgaccaacctggaacgtcagcagatcctgactgaagagcagtatctggacgcgctggaagagttcggtgacgaattcgacgcgaagatgggggcggaagcaatccaggctctgctgaagagcatggatctggagcaagagtgcgaacagctgcgtgaagagctgaacgaaaccaactccgaaaccaagcgtaaaaagctgaccaagcgtatcaaactgctggaagcgttcgttcagtctggtaacaaaccagagtggatgatcctgaccgttctgccggtactgccgccagatctgcgtccgctggttccgctggatggtggtcgtttcgcgacttctgacctgaacgatctgtatcgtcgcgtcattaaccgtaacaaccgtctgaaacgtctgctggatctggctgcgccggacatcatcgtacgtaacgaaaaacgtatgctgcaggaagcggtagacgccctgctggataacggtcgtcgcggtcgtgcgatcaccggttctaacaagcgtcctctgaaatctttggccgacatgatcaaaggtaaacagggtcgtttccgtcagaacctgctcggtaagcgtgttgactactccggtcgttctgtaatcaccgtaggtccatacctgcgtctgcatcagtgcggtctgccgaagaaaatggcactggagctgttcaaaccgttcatctacggcaagctggaactgcgtggtcttgctaccaccattaaagctgcgaagaaaatggttgagcgcgaagaagctgtcgtttgggatatcctggacgaagttatccgcgaacacccggtactgctgaaccgtgcaccgactctgcaccgtctgggtatccaggcatttgaaccggtactgatcgaaggtaaagctatccagctgcacccgctggtttgtgcggcatataacgccgacttcgatggtgaccagatggctgttcacgtaccgctgacgctggaagcccagctggaagcgcgtgcgctgatgatgtctaccaacaacatcctgtccccggcgaacggcgaaccaatcatcgttccgtctcaggacgttgtactgggtctgtactacatgacccgtgactgtgttaacgccaaaggcgaaggcatggtgctgactggcccgaaagaagcagaacgtctgtatcgctctggtctggcttctctgcatgcgcgcgttaaagtgcgtatcaccgagtatgaaaaagatgctaacggtgaattagtagcgaaaaccagcctgaaagacacgactgttggccgtgccattctgtggatgattgtaccgaaaggtctgccttactccatcgtcaaccaggcgctgggtaaaaaagcaatctccaaaatgctgaacacctgctaccgcattctcggtctgaaaccgaccgttatttttgcggaccagatcatgtacaccggcttcgcctatgcagcgcgttctggtgcatctgttggtatcgatgacatggtcatcccggagaagaaacacgaaatcatctccgaggcagaagcagaagttgctgaaattcaggagcagttccagtctggtctggtaactgcgggcgaacgctacaacaaagttatcgatatctgggctgcggcgaacgatcgtgtatccaaagcgatgatggataacctgcaaactgaaaccgtgattaaccgtgacggtcaggaagagaagcaggtttccttcaacagcatctacatgatggccgactccggtgcgcgtggttctgcggcacagattcgtcagcttgctggtatgcgtggtctgatggcgaagccggatggctccatcatcgaaacgccaatcaccgcgaacttccgtgaaggtctgaacgtactccagtacttcatctccacccacggtgctcgtaaaggtctggcggataccgcactgaaaactgcgaactccggttacctgactcgtcgtctggttgacgtggcgcaggacctggtggttaccgaagacgattgtggtacccatgaaggtatcatgatgactccggttatcgagggtggtgacgttaaagagccgctgcgcgatcgcgtactgggtcgtgtaactgctgaagacgttctgaagccgggtactgctgatatcctcgttccgcgcaacacgctgctgcacgaacagtggtgtgacctgctggaagagaactctgtcgacgcggttaaagtacgttctgttgtatcttgtgacaccgactttggtgtatgtgcgcactgctacggtcgtgacctggcgcgtggccacatcatcaacaagggtgaagcaatcggtgttatcgcggcacagtccatcggtgaaccgggtacacagctgaccatgcgtacgttccacatcggtggtgcggcatctcgtgcggctgctgaatccagcatccaagtgaaaaacaaaggtagcatcaagctcagcaacgtgaagagcgttgtgaactccagcggtaaactggttatcacttcccgtaatactgaactgaaactgatcgacgaattcggtcgtactaaagaaagctacaaagtaccttacggtgcggtactggcgaaaggcgatggcgaacaggttgctggcggcgaaaccgttgcaaactgggacccgcacaccatgccggttatcaccgaagtaagcggttttgtacgctttactgacatgatcgacggccagaccattacgcgtcagaccgacgaactgaccggtctgtctagcctggtggttctggattccgcagaacgtaccgcaggtggtaaagatctgcgtccggcactgaaaatcgttgatgctcagggtaacgacgttctgatcccaggtaccgatatgccagcgcagtacttcctgccgggtaaagcgattgttcagctggaagatggcgtacagatcagctctggtgacaccctggcgcgtattccgcaggaatccggcggtaccaaggacatcaccggtggtctgccgcgcgttgcggacctgttcgaagcacgtcgtccgaaagagccggcaatcctggctgaaatcagcggtatcgtttccttcggtaaagaaaccaaaggtaaacgtcgtctggttatcaccccggtagacggtagcgatccgtacgaagagatgattccgaaatggcgtcagctcaacgtgttcgaaggtgaacgtgtagaacgtggtgacgtaatttccgacggtccggaagcgccgcacgacattctgcgtctgcgtggtgttcatgctgttactcgttacatcgttaacgaagtacaggacgtataccgtctgcagggcgttaagattaacgataaacacatcgaagttatcgttcgtcagatgctgcgtaaagctaccatcgttaacgcgggtagctccgacttcctggaaggcgaacaggttgaatactctcgcgtcaagatcgcaaaccgcgaactggaagcgaacggcaaagtgggtgcaacttactcccgcgatctgctgggtatcaccaaagcgtctctggcaaccgagtccttcatctccgcggcaagcttccaggagaccactcgcgtgctgaccgaagcagccgttgcgggcaaacgcgacgaactgcgcggcctgaaagagaacgttatcgtgggtcgtctgatcccggcaggtaccggttacgcgtaccaccaggatcgtatgcgtcgccgtgctgcgggtgaagctccggctgcaccgcaggtgactgcagaagacgcatctgccagcctggcagaactgctgaacgcaggtctgggcggttctgataacgagtaatcgttaatccgcaaataacgtaaaaacccgcttcggcgggtttttttatggggggagtttagggaaagagcatttgtcagaatatttaaggaatttctgaatactcataatcaatgtagagatgactaatatcctgaaactgactgaactaattgagtcaaactcggcaaggattcgatactattcctgtgtaactttcttaaggaacgagaatgaaacaggaagtggaaaagtggcgaccttttggacatccggatggtgatattcgtgatttaagttttcttgatgctcatcaggctgtctacgttcagcatcatgagggcaaagagcctttagagtatcgcttttgggttacctactctcttcactgcttcacaaaagattatgaacatcagacgaacgaagaaaaacaaagcttaatgtaccacgcgcctaaagaatctcgtcccttctgccagcaccgttataacttagcgcgcacacacttaaaaagaactattttggcgctgccagaaagcaacgttattcatgccgggtatggtagctatgccgtgattgaggtggacttagacggaggagataaggcattttactttgttgcgttcagggctttcagggaaaagaaaaaactccgtttgcatgtaactagcgcttatcccatttctgaaaaacagaaaggtaaaagtgtgaaatttttcaccattgcctacaacttattgagaaataagcagcttcctcagcccagtaaataacaaaacccaccttaaggtgggtttcgccagagaattatctctggtattcagaacgccattaccggactttgccttgaccttgcgataatcgcaggttgcgggatgtctgaatttcttcagtctgctgcatcctggaagatgagaacatgtgttcttattttcgtctctatcatagttgagtatttactctcttacaatcagatctctttcattgctcaacaggcgatggcttcagactttgcattacggaatttttaagaaaggcagggcgaaacgaggaagaagcttttcgccctggacaacattcctgctgacggcactaccataaaaaaacacaacgctttcaacaaccttgcgtttttcatcttccgtagcggctcggaataaatttacgttcttacattccgtctcatagtctttggctggcgcgtcccagatagctgtcccagtctttccataccggctgcaaaccctgagcggttaacgcggcagcaaccgcttccggtctgcgatcgtcgtgcggactgaactgttccaactcggggtgattatcggcatagccacctggctgcgttttgctgaaggcgctgacgttattgatcgccagcggaataacgcgatcgcgaaaccacggactttcccgcgtggagagactcagttcaatctccggtgcaagcagtcggaaggcgcagatggtttgcactaactggcgttcatccataatgctcgcaggctcaatgccgccagtacacgggcgcaggcgcggaaaggagacagagtaacggctttgccagtaatgctgttgcagccatagcaaatgttcggcaaccatatagctgtcaacgcgccagttgtcggaaaggccaattagcgcgccgaggcctatcttatcaatccccgcacgccccagccgatccggcgtttccagccgccagaagaagtcctgttttttgcctttcagatgatggcgggcataagtcgcctcgtgatatgtctcctgataaaccatcacgccatccagaccaagttgctttaactcggcgtattccgtctccgccagcggttgcacttccatctgtagactagagaactgttcacgaagggcagggagatgacgacgaaagtaatccatccccactttcgcctgatgttcaccagtgactaacagcagatgttcaaagcccatctcccgtatagcggcactttccctggcaatatccgcttcatccagcgttttgcgcttgatgcgattactcatggaaaatccacagtacgtgcagtcgttagcgcaaagattggaaagataaagcgggacgtagaaactaactgtgttgccaaatcgctgacgggtcagacgctgcgcccgttgggccagttgttccagatagccactggcggcagggcttaacagcgccatcatgtcgtcgcgggtgagttggctggcatttagcgcccgctctacgtcagcagccgttttgccgttgatacgcaggcggatgtcgtcccagtccagttgtcgccagcgatcgctgaaggttttcatgcgcttgcctccagaaatccggtcagcgggctggtggcatgagcaaaataactgcggctgcccggtccggactgacgtgccagtaggcctgcttctaccgccagacgaaatgccttcgccatgttgacgggatcgtccgcgacggcaatcgccgtattcactaacaccgcgtcggcccccatttccagcgcctgcgcggcatggctgggaacgccgatgccagcatcgacaaccaccggcactgtggcctgctggataataatctccagcatggcgcgggtttccagtccctgattgctgccaatcggcgcgccgagcggcatcaccgctgcacagccgacttcttccagacgtttacacaataccggatcggccccgcagtaaggcagcacgacaaatccctgttgtaccagcgtttcggcggctttcagggtttcgatgggatcgggcaacagccagcgggcgtcagggtgaatctctaattttaaccagtttgtgcctaacgcttcacgagccagatgggcggcgaaaatggcttcttccgctgttttcgccccggatgtatttggcagcagggtcacacccgccgcgataagcggttcgaggatagcgtcgttgtgctggcgcaagtcgacacgtttcatcgccagtgtcaccagctggctgccggaagcgcggatcgcctccaccatcagttgactagaagcgaatttccctgtgccggtaaacagatgactatcaaacgttttgtccgcaatacgtaacatttcaaccccctgcaataacctgaaaaagcaggatctggtcgccatcctgcacgatatgttgcgcccactgctcacgcgggacgatttgctgattaatcgccagagccgcgcccgcttgtcgttggtcgagttgctccagtagttcgtgaacagtttgcccggcggcgcactgcatcgcttgatcgttaaacaggatctgcattgcttcctccgcataccgggcaaccactggcgcggcgcaacgccaggctgcgccactggctgcttttaccgtcgaacagtcggagttctcccgcaggtgtctctataccgcttaataacttaatggcttccagtgcctgcaaagtgcccataaccccgaccaccgggccaaccacgcccgccgtgcggcagttgcgttctggctcctggttatctggccacaggcagcggtaacacccctgctcccagggcggcgtcagtaccatcaactgaccgccaaatccgaccgcgctggcggtgataagcggcgtgttgagtgccacgcaggcggcattaatctcctggcgagtcgccatattgtcggtacagtcgagcaccacatcggcccgtgcaaccgcatcttttaacgcctcacccgttaaccgttgttgtaatgctgtcagttgaatgtcgggattcaactgtgtcagtcgctgttggctgacctggcttttcgggcgatcgatatcttcagtggtaaagaggatttgtcgttgcagattgcttaaatgcacatcgtcgtcatctgccagtaccagcgtcccgacgccagcgcccgccaggtacagcgcagcaggtgtacccagcccgcccagaccgataatcagcacctggctgtcgagcagtttttgctgcccgtccagagcgatatcgtcgagcaggatttggcggctataacgcataaagtcacggtcattcatcgccaactcctgcaatttccagcaactgtgccgttgccaaacgccagtctgcggcttgagtaatggcgctgacgacggcgatactgccgacacccgttgctatcaccgcaggcgcgcgtgccagactgataccgccaatcgccacggtgggataatccgccagtcgctcaacatgccgtgccagctgttccagcccctgcggtgcagaaggcatctgtttggtttgcgtcgggaacacatgtcccagcgcgatataagaggggcgtgctgccagcgcgacgtcgatttccatatcgtcatgtgtgctaacgcccagccgcaggcctgccgcgcggatggcattgagatcggtggcttgcaaatcttcctgccccaaatggacgccatacgcctgatgcttgatcgccagccgccagtaatcgttgataaacaatcgcgcgttatagcggcggcccagcgcaattgccgccacgacatcggcttccacctcttcatcgcgccgatctttgatgcgtagctggagagtacgtacgcctgcatccaacagacgttcgatccactgtacgctgtccaccaccgggtacagtccactacgaaaaggtacaggaggaaaatcaggctgatacatcacgcttcctccttacgcaggtagatttctccgcctctggcacggaagttctcgctcatatccgccattcccatttcaatagtttgcgtggcggcgtaatcacgcacttcctggctgattttcatgctgcagaatttcggcccacacatggagcaaaaatgggcgactttaccactctcttgcggcagggtttcatcgtgataagcgcgggcggtaaacgggtcgagggccagattaaactggtcttcccagcgaaattcgaagcgggctttgctcatggcgttatcgcgaatttgcgcgcccggatgccctttcgccaggtcagcggcgtgggcagcaatcttataggtgataagcccctgcttaacatcttctttattgggcagacccagatgctcttttggcgttacgtaacagagcatcgcgcagccaaaccagccaatcatcgccgcaccaatcccgctcgtgaagtggtcatagcccggcgcaatatcggtagttagcggccccagagtgtaaaacggcgcttcgtggcagtgctctaactcctcggtcatattgcggcggatcatctgcatcggcacgtggcctgggccttcaatcatcacctgcacgtcatattcccaggcaattttggtcagttcgcccagcgtatgcagctcggcaaactgcgcttcatcgttggcgtcctgaatagaaccggggcgcagaccgtcgcccaggctcaggctaacgtcataagcggcacagatttcacaaatttcgcggaagtgttgatagaggaaattttcctgatgatgggagaggcaccatttcgccataatgctaccgccgcgagagacgataccggtcaggcgtttcgcggtcatcggcacatagcgcagcagtacgcccgcatggatagtgaagtaatccacaccttgctcggcctgttccagcagcgtgtcgcggaacgcttcccaggtaagatcttcggcgatcccgttaaccttctccagcgcctggtagatcggcactgtaccgatcggcaccgggctgttacgcaaaatccactcgcgggtttcgtgaatatagcgaccggtggagagatccatcaccgtatccgctccccagcgcgtggaccataccagcttttccacttcttcttcgatggaagaggtgaccgcgctgttgccgatattggcgttaacttttaccaggaaattgcgaccaataatcatcggctcgctttccggatgattaatgttggccgggataatcgcacgtccggcagcaacttcatcacggacaaattccgcagtgatattttccggcagatgtgcgccaaagctcattcccggatgctggtggcgtaaaacctcgctacggatgcgctcgcggcccatattctcgcggatggcgatgaattccatttccggcgtgatgatgccctggcgggcgtagtgcagttgggtgacacggcgtcctgctttggcgcgttttggtgttagtacgccgctaaaacgcagttcgtcgaggccatcatctgccagccgcgctttagtgtaatcggaactgcgcacggtaagttcttcggtatcgccgcgcgcatcgatccacggctggcgtagttttgccagcccttgctgcacgttaatggcaatctgcggatcaccatacgggccggaggtgtcgtagaccggaatcgcttcgttttcttcgtactgcggctgttctttgctaccgccaattagcgtcgggctaagctggatctcacgcatcggcacgcgcacgccggggtgtgtgccagtgatataaatgcgtttactgttgggaaaggcggtgccttccagggtgtcgataaaatgttgggcccgggcgcgttgttcgcggcgggtcagttttgttgcagacatagctcattccaaaaagttaaggacgtggcttgtcagacgacggatgaagcaagagacgatcgccgcaggggcgatgcgatagcagattaactcttgttcccttcgcaggtattagcctgatcaggttccgcggatcccgaataaacggtctcagccagttaaggcactccgacaagaaattagccccgcaaatggggcattgaatgtaaattacgcgttaacagcgcagaactcaagcaggatgtttgacgcgggcggcgtcaagcaccagcagaatcagcttatcttccagcacaaagcgcgcttccagcgcctcgccgatgtcagataaaacctgttgaaactcaaggtaattatcatgatcgatggcggtttccagactggaatcgtagtaatccataatctgttgagtattggcttcgagttgcggccaaatcttcgcggcgcgcgcgagttgcccgttgccttccagcttatgaagaatgcgctcataaatactgaaatgtccggcagacaagtaatcgaccaggctctgacaaaaatcatcaagggctttttcgtttagcctcatgtagctttctttgccaggcttaatgccaaccagattgtagtaagccacgagcagatgcttacgtacatgtagccagcgatcaaccagtttgttacttcctctgacgcgctccgtcaggttatcgagctggttaagcatgattgactccgcaagtttgtattcaaaaactgctcagtgagaaatgtaaaaaccatgttaaacatgccagtgatgcaaaggtagtgcaagagctatggatcgtataattgaaaaattagatcacggctggtgggtcgtcagccatgaacaaaaattatggttgccgaagggagaattgccatatggcgaagcggcaaatttcgatcttgtgggtcagcgcgcactacaaatcggcgaatggcagggggaacctgtttggttagtacaacagcagcggcgtcacgatatggggagcgtacgtcaggtcattgatctcgatgttgggctgtttcaactggccggacgaggcgtacaactggcggagttttaccgaagtcataaatactgtggttactgcgggcatgaaatgtatccgagcaaaaccgaatgggcgatgctgtgcagccattgccgtgagcgttactacccgcaaatcgccccctgcattattgttgccatccgtcgcgatgatagcatcctcctcgcccagcatacccgccatcgtaacggtgtccatacagtacttgccggattcgtcgaagtgggcgaaaccctcgagcaggcagtcgcgcgggaagtgatggaagagagcggaattaaagttaaaaacttgcgttacgtgacttctcagccgtggccgtttcctcagtctttaatgaccgcgtttatggcggaatatgacagcggcgacatcgtgatcgacccgaaagaattgctcgaggcgaactggtatcgctatgacgatttgccgttactcccgccgcccggcaccgtagcgcgccgtctgatagaagatacggtggcgatgtgtcgggcagagtatgagtgatgatacactgaccgcctgacgcactaaggaacagccaaaatgaccgaacttaaaaacgatcgttatctgcgggcgctgctgcgccagcccgttgatgtcactccagtatggatgatgcgccaggcgggtcgctatctaccggaatataaagccacgcgcgcccaggcaggcgattttatgagcctgtgcaaaaacgccgagctggcgtgcgaagtgactttgcaaccgctgcgtcgctacccgctggatgcggcgatcctcttttccgatatcctcaccgtgccggacgcgatggggttagggctctattttgaagccggagaaggtccgcgttttaccagcccagtcacctgcaaagctgacgtcgataaactgccaattccggacccggaagatgaactgggttacgtgatgaacgcggtgcgtaccattcgtcgcgaactgaaaggcgaagtgccgctgattggtttttccggcagcccgtggacgctggcgacctacatggtggaaggcggcagcagcaaagccttcaccgtgatcaaaaaaatgatgtatgccgatccgcaggcgctgcacgctctgctcgataaactggcgaaaagcgtcactttgtatctgaatgcgcagattaaagccggtgctcaggcagtgatgattttcgacacctggggcggcgtgcttaccgggcgcgattatcaacagttcagcctctattacatgcataaaattgttgatggtttactgcgtgaaaacgacggtcgccgcgtaccggtcacgctgtttaccaaaggcggcggacagtggctggaagccatggcagaaaccggttgcgatgcgctgggcctcgactggacaacggacatcgccgatgcgcgccgccgtgtgggcaataaagtcgcgttgcagggtaatatggatccgagcatgctgtacgcgccgcctgcccgcattgaagaagaagtagcgactatacttgcaggtttcggtcacggcgaaggtcatgtctttaaccttggtcacggcattcatcaggatgtgccgccagaacatgctggcgtgttcgtggaggcagtgcatcgactgtctgaacagtatcaccgctaaggagtgattatggatctcgcgagtttacgcgctcaacaaatcgaactggcttcttctgtgatccgcgaggatcgactcgataaagatccaccggatctgatcgccggagccgatgtcgggtttgagcagggcggagaagtgacgcgagcggcgatggtgctgctgaaatatcccagccttgagctggtcgagtataaagttgcccgcatcgccaccaccatgccttacattccaggttttctttccttccgcgaatatcctgcgctgctggcagcgtgggagatgctgagccaaaagccggatttagtgtttgtcgatggtcatgggatcagccatcctcgccgtcttggcgtcgccagccattttggcttattggtggatgtgccgaccattggcgtggcgaaaaaacggctctgcggtaaattcgaaccgctctccagcgaaccgggcgcgctggccccactgatggataaaggcgagcagctggcctgggtctggcgcagcaaagcgcgctgtaacccgttgtttatcgctaccggccatcgggtcagcgtggacagcgcgctggcgtgggtacaacgctgcatgaaaggctatcgtctgccggagccaacgcgctgggcggacgcggtggccagcgaacgtccggcgttcgtgcgctatacagcaaatcagccctaattcaggtaaactgcggataatttccgtatttgagaactcaacatgttacaaaacccaattcatctgcgtctggagcgcctggaaagctggcagcatgtcactttcatggcttgcttatgcgaacgcatgtaccccaattacgccatgttctgccagcaaaccggttttggtgatgggcaaatttaccgtcgcattctcgatctcatctgggaaacgctgaccgttaaagacgcaaaagtaaatttcgacagccaactggagaaatttgaagaagcgattcctagtgccgacgatttcgatctgtacggcgtttatccggcaatcgatgcctgcgtggcgttaagtgaactggtccatagccgtttgagtggtgaaacgctcgaacacgcggtggaagtgagtaagacctccatcacgaccgttgcgatgctggaaatgactcaggctggtcgcgaaatgagcgatgaagagcttaaagaaaacccagctgtagagcaagaatgggacattcagtgggaaatattccgacttttagctgagtgcgaagaacgcgatatcgagctgataaaaggccttagggcagacctgcgtgaggcgggtgagagcaatattggtataatttttcagcaataagaccagaaaacgtgatttaacgcctgatttgtcgtacctggagtcttccctttcgcccccgtctggtctacatttggggggcgaaaaaaagtggctatcggtgcgtgtatgcaggagagtgctattctggcatttccgtcgcactcgatgcttagcaagcgataaacacattgtaaggataacttatgaacaagactcaactgattgatgtaattgcagagaaagcagaactgtccaaaacccaggctaaagctgctctggagtccactctggctgcaattactgagtctctgaaagaaggcgatgctgtacaactggttggtttcggtaccttcaaagtgaaccaccgcgctgagcgtactggccgcaacccgcagaccggtaaagaaatcaaaattgccgcagctaacgtaccggcatttgtttctggcaaggcactgaaagacgcagttaagtaagattgcgtggcagtgaacagttttaacgaaggggtggttagtccccttttgtctttctggcgtcgaagtttgatgctggctggcgctctgcttctcactgcctgtagtcataactctagtcttcctccctttaccgccagtggatttgctgaagaccagggcgcggtacgcatctggcgaaaagacagcggcgataatgtgcatctgcttgccgtgtttagcccgtggcgcagtggcgataccacgacgcgagagtatcgctggcagggcgataacctcacgctcatcaatatcaatgtttacagcaaaccgccggtgaatattcgcgcgcgttttgacgatcgcggtgatctgagctttatgcaacgtgaatccgatggggaaaagcagcagctttctaacgaccaaatcgatttataccgttatcgtgctgatcagatccgccagattagcgatgccttacgtcaggggagagtcgtgctgcgccaggggcgctggcatgcgatggaacagaccgtgaccacctgcgaagggcaaaccattaaacctgatttagatagccaggcgatagcgcatatcgagcgccgccagagccgctcttctgttgatgtcagcgtggcatggctggaagcgcccgaaggtagccaattactgttagtggcaaactctgatttctgtcgctggcaacccaacgagaaaacgttctgatttaccagtggcccatacccatatgaccgccaccaccgcagccgccgtagcccatgcccattccggctccgcgcggaatacccgcttcagccatcgcgatatctcgtttcacccgtaactcatctaagctctgacgcaaattctccatctctttggcgaccgcgttaattttgctgctatccggtgggttcgcggctaacagggcattgtattcataacgcttcgtcaccagttgctgttgcagtgcgctgctttgagcgtaaaagtcattatggattttctgccacgctgtctgttgttcgctggtcaaaggcgcggcattttgctgccacataccgtgtccgccgtgagcaaatgcagatgtgcttcccatcgccattgcactaagcgccatcattaccagggcaattttcgtgttccgtttcatggttaatcctccagtggttgtcttacttcgggtattgcatcttccgtgccaacgatgaaacgctgatatgacgggtaatctggcatgataaacgagtaaaaatgactcgcctgctgcgggtagcgagtcatttttactcattgaaacttaagcctttgtgttacagcgcagggtaagcgctgataaaagatggcatgatttctgctgtcagaaagggatgagcaggcaaagaagaagatgcgttttatgcaacgttctaaagactccttagctaaatggttaagcgcgatcctccccgtggtcattgttgggctggtgggattgtttgcggtaactgtgattcgtgattatgggcgggcaagcgaggcagaccgccaggcattactggaaaaaggtaatgtgcttatccgcgctctggagagcggaagccgcgtagggatggggatgcgaatgcaccatgtacagcaacaggcgcttctggaagagatggcgggacagccgggagtgttgtggttcgcagtcaccgatgcgcagggcatcattattcttcatagcgaccccgataaggtcgggcgtgcgctctatagcccggatgaaatgcagaaattaaagccagaggaaaactcccgctggcggctgcttgggaaaacggaaactacgcctgcacttgaggtctatcgtttgttccagccaatgagtgcgccctggcggcatggaatgcacaatatgccgcgctgtaacggcaaagctgtgccacaagtagatgcacaacaggctatttttatcgccgttgatgccagtgatctggttgcaacccagagtggggaaaagcgcaataccctgattatcctcttcgccctggcgacggtcttgctggcaagcgtattgagtttcttctggtatcgccgctatctgcgcagccgccagcttctacaagatgaaatgaagcgcaaagagaagctggtggcgctggggcatcttgcggcaggcgttgcccacgaaatccgtaacccactttccagcattaaaggactggcgaaatactttgccgagcgcgcgcctgcagggggagaagcgcatcaactggcgcaggtgatggcgaaagaggccgaccgtttaaaccgcgtggtaagcgagttgctggaactggttaagccaacgcatctggctttgcaggcggtggatctcaacacgctgattaaccacagtttacagctggtaagtcaggatgcaaacagccgggagatccagttacgctttaccgccaacgacacattaccggaaattcaggccgacccggacaggctgactcaggtcctgttgaatctctatctcaatgctattcaggcgattggtcagcatggcgtgattagcgtgacggccagcgaaagcggcgcgggcgtgaaaatcagcgttaccgacagcggtaagggaattgcggcagatcagcttgatgccatcttcactccgtacttcaccactaaagccgaaggcaccggattggggctggcggtcgtgcataatattgttgaacaacacggtggtacaattcaggtcgcaagccaggagggaaaaggcagtacgttcaccctctggcttccggtcaatattacgcgtaaggacccacaaggatgacgcacgataatatcgatattctggtggtggatgatgacattagccactgcactattttgcaggctttactgcgcggctggggctataacgtcgcgctggcgaacagcgggcgacaggcgttggagcaggtgcgggaacaggtttttgatcttgtgctttgcgatgtgcgaatggcggagatggacggcatcgccacgctgaaagagatcaaagcgttaaacccggcaattccggtgctgattatgactgcgtactccagcgtcgagacggcggtagaggcactgaaaactggggcgctggattatctcatcaagccgctggatttcgataacctacaggcgacgctggaaaaagcgctcgcgcatacgcacagtattgatgctgaaacacctgcggtgactgccagccagttcggtatggtcggtaaaagcccggcgatgcaacacctgctcagtgaaatcgccctcgtcgcgccaagcgaagccacggtactgatccacggcgattccggcaccggtaaagagctggtcgccagggcgattcacgccagtagcgcacgtagcgaaaaaccgctggtaacgctcaactgtgcggcactcaacgaatccttgctggaatctgaattgttcggtcacgaaaaaggggcgtttactggagccgataaacgccgggaagggcgctttgttgaggcggacggcggcacgctgtttctcgatgaaattggcgatatcagcccgatgatgcaggtgcgtctgctgcgtgcgattcaggagcgcgaagttcagcgtgtcggtagcaaccagattatcagcgttgatgtccggctgattgcggcgacccatcgcgatcttgccgcagaggtgaatgccgggcgttttcgccaggatctctactatcgcctgaatgtggtggcgattgaagtaccaagcctgcggcaacggcgggaagatatccctctgctggctggccattttctgcagcgctttgccgagcgtaatcgcaaggcggtaaaaggttttacgccccaggcgatggatctgttgattcattacgactggccgggaaatattcgtgagctggaaaacgcggtggaacgggcagtggtgctgctgaccggggaatatatttccgaacgcgagctgccgctggcgattgccagtacgccgatcccgctgggacaaagtcaggatattcagccgttggtggaagtggaaaaagaggtgattctggcggcgctggagaaaacgggcggcaacaaaaccgaagccgcccgtcagttagggatcacgcgcaaaacgctattggcaaaactgagccgttaattctgctcgcgttcgatagcgcgccagccgatatctttccggcagaagcagtcgtcccagtggatatcggtcattaaggcataggcgcgtttctgcgcttctgccacggtatgacccagcgcggtgacgcacagtacgcgcccgccgttggtcactacctgctcgtcatccgccagttttgtgcccgcgtggaacactttgccgcctgccacttcttccagcggcaggccgtggatcacgtcaccggtgcggtaatcacccggatatccacccgcagccatcaccacgccgagagaagcgcgttcatcccactcggacgttttctcgtccagtttgctttcacaggccgccaggcagagctcaaccagatcggacttcatgcgcagcataatcggctgggtttccggatcgccaaagcggcagttaaattcaataaccttcggattgccctgtttgtcgatcatcaggcccgcgtagagaaaaccggtgtaggtgttgccttccgccgccatgcctttcacggttggccagataatacgttccatggtgcgctgatgaacgtcatcggttactaccggcgcgggggagtaagcgcccatcccgccggtgtttggtccggtatctttatcgcctacgcgtttgtgatcctggctggtagccatcggcagcacatgctcgccgtccaccatcacgataaagctcgcttcttcgccatcgaggaactcttcgataacgatgcgatgacccgcgtcgccaaaagcgttgcccgccagcatatcgtgaacagccgcttccgcttcttccagcgtcatcgccacgataacgcctttcccggcagccagaccgtccgctttaatgacgattggcgcgcctttctcacgcagatacgccagcgcaggttctacctcggtgaagttctggtattccgccgtagggatcttatggcgggccaggaaatctttggtaaacgctttactgccttccagttgggccgcacctgcggttgggtcgaagattttcagcccggcggcgcggaaggtatcgaccacgcctttcaccagcggcgcttccgggccgacgatggtcagatcaatcttttcgttttgtgcgaaatccaacagcgccgggatatcggtcacgccaatagcaacgttttgcagcgcgggttccagtgcagtgcctgcattacccggagcaacaaaaacagtctcaaccagcgggctctgggccgctttccaggccagcgcgtgctcgcgcccgccgttaccaatcactaatactttcatctattgctccattaatggcggaagtggcgcatgtcggtgaagagcatcgcaataccgtgctcgtcggcggcggcaatcacttcgtcatcacggatagaaccgccaggctggattacgcaggtcacgcccgcagcggcggcggcatcaataccgtcgcggaacgggaagaacgcgtcagaagccatgctggaacctttcacttccaggccttcatcggccgctttaataccggcgatttttgcggagtacacgcggctcatctggcccgcgccaatgccgatagtcatattgtttttggcatagacgatagcgttggatttcacaaacttcgccaccttccagcagaacagcgcatcacgcagttcctgttcgctcggctgacgtttggtcaccacgcgcagttcttccgcaccgaccatccccaggtcacgatcctgaaccagcagaccgccgttcacgcgtttgaaatcgaggcccggaacacgctcgccccactgaccgcaggtcagaacgcgtacgttctgtttggcggcggtgattttcagggcttcttcgctggcggacggcgcaataatcacttcgacaaactgacgagaaatgatggcctgtgcggtttccgcatccagctcgcggttaaaggcaatgatgccgccgaatgcggaggttgggtcggttttgtacgcgcgatcgtaagcatcaagaatggaattgccgatagccacgccgcaagggttggcgtgcttcacaatcacacatgccggctcggcgaactctttcacgcactccagcgccgcatcggtatcggcgatgttgttataagagagggctttaccctgaacctgggttgcggtagcaacggaggcttctttcacattctcttctatatagaaggcagcctgctggtggctgttctcgccgtaacgcatatccagcttcttaatgaagttcaggttcagcgtgcgtgggaagcgaccggcggcttctttgctttcaccgtggtaagccggaaccatgctgccgaagtagttggcaatcatgctgtcgtaggcggcagtgtgttcgaaggctttgatggcgaggtcgaaacgggttgcaagcgtcaggcttccttcgttgtcatccatctctttaataatggcgtcatagtcgctgctcttcaccacgattgcgacatctttatggttcttggcggcggagcgcaccatcgttgggccgccgatatcgatgttctcaaccgcatcttccaggctgcaaccttcacgggccacggtctgggcgaacggatacaggttaacaaccaccatatcgataggctggatctgatgttcttccataatggcatcgtcctggccgcgacggcccagaatgccaccatgtactttcggatgcagggtcttcacgcgtccatccatcatctccgggaaaccggtgtaatcggaaacttcggttaccggcagacctttttctgctaacagacgggcagtgccccctgtagacagcagctccacaccgcgtgcggaaagtgcctgggcgaattcgacgataccggctttgtcagaaacactgagcagagcgcggcggactggacgacgttgttgcatggtaaatcccctggatttgactattacagagagcgttagctgaatttttcgcgaaaaactcagctaacgcccctaacggggcatccttatttttcgcccgcattgtaacgaaaacgtttgcgcaacgctcgcgaatttttctctttcaatggtgatcacaattttgactgtggttaccgtgggcaaaatacagaaattacattgatgattgtggataactctgtgcgtaaaaaggtataaagcgggcttttgctggggaatgcagcagtcagtcatttttctgcaatttttctattgcggcctgcggagaactccctataatgcgcctccatcgacacggcggatgtgaatcacttcacacaaacagccggttcggttgaagagaaaaatcctgaaattcagggttgactctgaaagaggaaagcgtaatatacgccacctcgcgacagtgcgctaaagcgcgtcgcaactgctctttaacaatttatcagacaatctgtgtgggcactcgaagatacggattcttaacgtcgcaagacgaaaaatgaataccaagtctcaagagtgaacacgtaattcattacgaagtttaattctttgagcatcaaacttttaaattgaagagtttgatcatggctcagattgaacgctggcggcaggcctaacacatgcaagtcgaacggtaacaggaagaagcttgcttctttgctgacgagtggcggacgggtgagtaatgtctgggaaactgcctgatggagggggataactactggaaacggtagctaataccgcataacgtcgcaagaccaaagagggggaccttcgggcctcttgccatcggatgtgcccagatgggattagctagtaggtggggtaacggctcacctaggcgacgatccctagctggtctgagaggatgaccagccacactggaactgagacacggtccagactcctacgggaggcagcagtggggaatattgcacaatgggcgcaagcctgatgcagccatgccgcgtgtatgaagaaggccttcgggttgtaaagtactttcagcggggaggaagggagtaaagttaatacctttgctcattgacgttacccgcagaagaagcaccggctaactccgtgccagcagccgcggtaatacggagggtgcaagcgttaatcggaattactgggcgtaaagcgcacgcaggcggtttgttaagtcagatgtgaaatccccgggctcaacctgggaactgcatctgatactggcaagcttgagtctcgtagaggggggtagaattccaggtgtagcggtgaaatgcgtagagatctggaggaataccggtggcgaaggcggccccctggacgaagactgacgctcaggtgcgaaagcgtggggagcaaacaggattagataccctggtagtccacgccgtaaacgatgtcgacttggaggttgtgcccttgaggcgtggcttccggagctaacgcgttaagtcgaccgcctggggagtacggccgcaaggttaaaactcaaatgaattgacgggggcccgcacaagcggtggagcatgtggtttaattcgatgcaacgcgaagaaccttacctggtcttgacatccacggaagttttcagagatgagaatgtgccttcgggaaccgtgagacaggtgctgcatggctgtcgtcagctcgtgttgtgaaatgttgggttaagtcccgcaacgagcgcaacccttatcctttgttgccagcggtccggccgggaactcaaaggagactgccagtgataaactggaggaaggtggggatgacgtcaagtcatcatggcccttacgaccagggctacacacgtgctacaatggcgcatacaaagagaagcgacctcgcgagagcaagcggacctcataaagtgcgtcgtagtccggattggagtctgcaactcgactccatgaagtcggaatcgctagtaatcgtggatcagaatgccacggtgaatacgttcccgggccttgtacacaccgcccgtcacaccatgggagtgggttgcaaaagaagtaggtagcttaaccttcgggagggcgcttaccactttgtgattcatgactggggtgaagtcgtaacaaggtaaccgtaggggaacctgcggttggatcacctccttaccttaaagaagcgttctttgcagtgctcacacagattgtctgatagaaagtgaaaagcaaggcgtcttgcgaagcagactgatacgtccccttcgtctagaggcccaggacaccgccctttcacggcggtaacaggggttcgaatcccctaggggacgccacttgctggtttgtgagtgaaagtcacctgccttaatatctcaaaactcatcttcgggtgatgtttgagatatttgctctttaaaaatctggatcaagctgaaaattgaaacactgaacaacgaaagttgttcgtgagtctctcaaattttcgcaacacgatgatgaatcgtaagaaacatcttcgggttgtgaggttaagcgactaagcgtacacggtggatgccctggcagtcagaggcgatgaaggacgtgctaatctgcgataagcgtcggtaaggtgatatgaaccgttataaccggcgatttccgaatggggaaacccagtgtgtttcgacacactatcattaactgaatccataggttaatgaggcgaaccgggggaactgaaacatctaagtaccccgaggaaaagaaatcaaccgagattcccccagtagcggcgagcgaacggggagcagcccagagcctgaatcagtgtgtgtgttagtggaagcgtctggaaaggcgcgcgatacagggtgacagccccgtacacaaaaatgcacatgctgtgagctcgatgagtagggcgggacacgtggtatcctgtctgaatatggggggaccatcctccaaggctaaatactcctgactgaccgatagtgaaccagtaccgtgagggaaaggcgaaaagaaccccggcgaggggagtgaaaaagaacctgaaaccgtgtacgtacaagcagtgggagcacgcttaggcgtgtgactgcgtaccttttgtataatgggtcagcgacttatattctgtagcaaggttaaccgaataggggagccgaagggaaaccgagtcttaactgggcgttaagttgcagggtatagacccgaaacccggtgatctagccatgggcaggttgaaggttgggtaacactaactggaggaccgaaccgactaatgttgaaaaattagcggatgacttgtggctgggggtgaaaggccaatcaaaccgggagatagctggttctccccgaaagctatttaggtagcgcctcgtgaattcatctccgggggtagagcactgtttcggcaagggggtcatcccgacttaccaacccgatgcaaactgcgaataccggagaatgttatcacgggagacacacggcgggtgctaacgtccgtcgtgaagagggaaacaacccagaccgccagctaaggtcccaaagtcatggttaagtgggaaacgatgtgggaaggcccagacagccaggatgttggcttagaagcagccatcatttaaagaaagcgtaatagctcactggtcgagtcggcctgcgcggaagatgtaacggggctaaaccatgcaccgaagctgcggcagcgacgcttatgcgttgttgggtaggggagcgttctgtaagcctgcgaaggtgtgctgtgaggcatgctggaggtatcagaagtgcgaatgctgacataagtaacgataaagcgggtgaaaagcccgctcgccggaagaccaagggttcctgtccaacgttaatcggggcagggtgagtcgacccctaaggcgaggccgaaaggcgtagtcgatgggaaacaggttaatattcctgtacttggtgttactgcgaaggggggacggagaaggctatgttggccgggcgacggttgtcccggtttaagcgtgtaggctggttttccaggcaaatccggaaaatcaaggctgaggcgtgatgacgaggcactacggtgctgaagcaacaaatgccctgcttccaggaaaagcctctaagcatcaggtaacatcaaatcgtaccccaaaccgacacaggtggtcaggtagagaataccaaggcgcttgagagaactcgggtgaaggaactaggcaaaatggtgccgtaacttcgggagaaggcacgctgatatgtaggtgaggtccctcgcggatggagctgaaatcagtcgaagataccagctggctgcaactgtttattaaaaacacagcactgtgcaaacacgaaagtggacgtatacggtgtgacgcctgcccggtgccggaaggttaattgatggggttagcgcaagcgaagctcttgatcgaagccccggtaaacggcggccgtaactataacggtcctaaggtagcgaaattccttgtcgggtaagttccgacctgcacgaatggcgtaatgatggccaggctgtctccacccgagactcagtgaaattgaactcgctgtgaagatgcagtgtacccgcggcaagacggaaagaccccgtgaacctttactatagcttgacactgaacattgagccttgatgtgtaggataggtgggaggctttgaagtgtggacgccagtctgcatggagccgaccttgaaataccaccctttaatgtttgatgttctaacgttgacccgtaatccgggttgcggacagtgtctggtgggtagtttgactggggcggtctcctcctaaagagtaacggaggagcacgaaggttggctaatcctggtcggacatcaggaggttagtgcaatggcataagccagcttgactgcgagcgtgacggcgcgagcaggtgcgaaagcaggtcatagtgatccggtggttctgaatggaagggccatcgctcaacggataaaaggtactccggggataacaggctgataccgcccaagagttcatatcgacggcggtgtttggcacctcgatgtcggctcatcacatcctggggctgaagtaggtcccaagggtatggctgttcgccatttaaagtggtacgcgagctgggtttagaacgtcgtgagacagttcggtccctatctgccgtgggcgctggagaactgaggggggctgctcctagtacgagaggaccggagtggacgcatcactggtgttcgggttgtcatgccaatggcactgcccggtagctaaatgcggaagagataagtgctgaaagcatctaagcacgaaacttgccccgagatgagttctccctgactccttgagagtcctgaaggaacgttgaagacgacgacgttgataggccgggtgtgtaagcgcagcgatgcgttgagctaaccggtactaatgaaccgtgaggcttaaccttacaacgccgaaggtgttttggcggattgagagaagattttcagcctgatacagattaaatcagaacgcagaagcggtctgataaaacagaatttgcctggcggcagtagcgcggtggtcccacctgaccccatgccgaactcagaagtgaaacgccgtagcgccgatggtagtgtggggtctccccatgcgagagtagggaactgccaggcatcaaattagaaaaaccccggtccataaggccggggttttttgcatatcaattatttgcatgatgaagggaatctcatgagtgttctgtatatccaaattcgtcgtaatcaaattactgttcgcgatcttgaaagcaaacgtgaagtgagtggagacgctgccttcagtaaccagcgcctgttaatcgccaatttctttgttgcagaaaaagttctgcaagatcttgttctgcaactccacccacgtagtacctggcattcttttttgccagcaaaacgtatggatattgttgtgagcgcactggaaatgaatgagggcggtttgagtcaggttgaggaacgcattctccatgaagtggtcgctggggcaacgttaatgaaatatcgccagttccacatccatgcgcaaagtgcggtactcagtgatagtgcggtcatggcaatgcttaagcagaaataatcgtgtcaccattggtgggtactaaacctgaagttcagcccaccgggatgagaaaaaatcgcttacgcccccacatacgccagattcagcaacggatacggtttccccaaatcgtccacctcagagcgtcccgtaaccttaaaacccaccttcttatagaacccaaccgcctgctcattttgctcattaacgttggttgtcagttccggtgccatgctgagcgcatgctccaccagcacccgacctacgccgcagccgcgcacatcaggatcgataaacagcgcatccatatgctgcccacttagcaacataaatccaaccggctgatcccgctcattaaccgcgacccacaacggcgcttccggcaggaaggaacgaactaggtcctccagctcggtccgatactctgcacttagaaaatcgtgagtggcatcgacagaacgacaccaaatcgcaacgagttcctccccttcctcatgccgactgcggcgaatactaataaccattttctctccttttagtcattcttatattctaacgtagtcttttccttgaaactttctcaccttcaacatgcaggctcgacattggcaaattttctggttatcttcagctatctggatgtctaaacgtataagcgtatgtagtgaggtaatcaggttatgccgattcgtgtgccggacgagctacccgccgtcaatttcttgcgtgaagaaaacgtctttgtgatgacaacttctcgtgcgtctggtcaggaaattcgtccacttaaggttctgatccttaacctgatgccgaagaagattgaaactgaaaatcagtttctgcgcctgcttagtaacagtcctttgcaggtcgatattcagctgttgcgcatcgattcccgtgaaagccgcaacacgcccgcagagcatctgaacaacttctactgtaactttgaagatattcaggatcagaactttgacggtttgattgtaactggtgcgccgctgggcctggtggagtttaatgatgtcgcttactggccgcagatcaaacaggtgctggagtggagcaaagatcacgtcaccagcacgctgtttgtctgctgggcggtacaggccgcgctcaatatcctctacggcattcctaagcaaactcgcaccgaaaaactctctggcgtttacgagcatcatattctccatcctcatgcgcttctgacgcgtggctttgatgatagtttcctggcaccgcatagccgctatgctgactttccggcagcgttgattcgtgattacaccgatctggaaattctggcagagacggaagaaggggatgcatatctgtttgccagtaaagataagcgcattgcctttatgacgggccatcccgaatatgatgcgcaaacgctggcgcaggaatttttccgcgatgtggaagccggactagacccggatgtaccgtataactatttcccgcacaatgatccgcaaaatacaccgcgagcgagctggcgtagtcacggtaatttactgtttaccaactggctcaactattacgtctaccagatcacgccatacgatctacggcacatgaatccaacgctggattaatcttctgtgatagtcgatcgttaagcgattcagcaccttacctcaggcaccttcgggtgccttttttatttccgaaacgtacctcagcaggtgaataaattttattcatattgttatcaacaagttatcaagtatttttaattaaaatggaaattgtttttgattttgcattttaaatgagtagtcttagttgtgctgaacgaaaagagcacaacgatccttcgttcacagtggggaagttttcggatccatgacgaggagctgcacgatgactgaacaggcaacaacaaccgatgaactggctttcacaaggccgtatggcgagcaggagaagcaaattcttactgccgaagcggtagaatttctgactgagctggtgacgcattttacgccacaacgcaataaacttctggcagcgcgcattcagcagcagcaagatattgataacggaacgttgcctgattttattagcgaaacagcttccattcgcgatgctgattggaaaattcgcgggattcctgcggacttagaagaccgccgcgtagagataactggcccggtagagcgcaagatggtgatcaacgcgctcaacgccaatgtgaaagtctttatggccgatttcgaagatagtctggcaccagactggaacaaagtgatcgacgggcaaattaacctgcgtgatgcggttaacggcaccatcagttacaccaatgaagcaggcaaaatttaccagctcaagcccaatccagcggttttgatttgtcgggtacgcggtctgcacttgccggaaaaacatgtcacctggcgtggtgaggcaatccccggcagcctgtttgattttgcgctctatttcttccacaactatcaggcactgttggcaaagggcagtggtccctatttctatctgccgaaaacccagtcctggcaggaagcggcctggtggagcgaagtcttcagctatgcagaagatcgctttaatctgccgcgcggcaccatcaaggcgacgttgctgattgaaacgctgcccgccgtgttccagatggatgaaatccttcacgcgctgcgtgaccatattgttggtctgaactgcggtcgttgggattacatcttcagctatatcaaaacgttgaaaaactatcccgatcgcgtcctgccagacagacaggcagtgacgatggataaaccattcctgaatgcttacagtcgcctgttgattaaaacctgccataaacgcggtgcttttgcgatgggcggcatggcggcgtttattccgagcaaagatgaagagcacaataaccaggtgctcaacaaagtaaaagcggataaaagcctggaagccaataacggtcacgatggcacatggatcgctcacccaggccttgcggacacggcaatggcggtattcaacgacattctcggctcccgtaaaaatcagcttgaagtgatgcgcgaacaagacgcgccgattactgccgatcagctgctggcaccttgtgatggtgaacgcaccgaagaaggtatgcgcgccaacattcgcgtggctgtgcagtacatcgaagcgtggatctctggcaacggctgtgtgccgatttatggcctgatggaagatgcggcgacggctgaaatttcccgtaccagcatctggcagtggatccatcatcaaaaaacgttgagcaatggcaaaccggtgaccaaagccttgttccgccagatgctgggcgaagagatgaaagtcattgccagcgaactgggcgaagaacgtttctcccaggggcgttttgacgatgccgcacgcttgatggaacagatcaccacttccgatgagttaattgatttcctgaccctgccaggctaccgcctgttagcgtaaaccaccacataactatggagcatctgcacatgaaaacccgtacacaacaaattgaagaattacagaaagagtggactcaaccgcgttgggaaggcattactcgcccatacagtgcggaagatgtggtgaaattacgcggtagtgtcaatcctgaatgcacgctggcgcaactgggcgcagcgaaaatgtggcgtctgctgcacggtgagagcaaaaaaggctacatcaacagcctcggcgcactgactggcggtcaggcgctgcaacaggcgaaagcgggtattgaagcagtctatctgagcggatggcaggtagcggcggacgctaacctggcggccagcatgtatccggatcagagcctctatccggcaaacagcgtgccagctgtggtggagcggatcaacaacaccttccgtcgtgccgatcagatccaatggtccgcgggcattgagccgggcgatccgcgctatgtcgattacttcctgccgatcgttgccgatgcggaagccggttttggcggtgtcctgaatgcctttgaactgatgaaagcgatgattgaagccggtgcagcggcagttcacttcgaagatcagctggcgagtgtgaagaaatgcggtcacatgggcggcaaagttttagtgccaactcaggaagctattcagaaactggtcgcggcgcgtctggcagctgacgtgacgggcgttccaaccctgctggttgcccgtaccgatgctgatgcggcggatctgatcacctccgattgcgacccgtatgacagcgaatttattaccggcgagcgtaccagtgaaggcttcttccgtactcatgcgggcattgagcaagcgatcagccgtggcctggcgtatgcgccatatgctgacctggtctggtgtgaaacctccacgccggatctggaactggcgcgtcgctttgcacaagctatccacgcgaaatatccgggcaaactgctggcttataactgcagcccgagcttcaactggcagaaaaacctcgacgacaaaactattgccagcttccagcagcagctgagcgatatgggctacaagttccagttcatcaccctggcaggtatccacagcatgtggttcaacatgtttgacctggcaaacgcctatgcccagggcgagggtatgaagcactacgttgagaaagtgcagcagccggaatttgccgccgcgaaagatggctataccttcgtatctcaccagcaggaagtgggtacaggttacttcgataaagtgacgactattattcagggcggcacgtctagtgtcaccgcgctgaccggctccactgaagaaagccagttctaagcaacaacaaccgttgctgactgtaggccggataaggcgttcacgccgcatccggcaatcggtgcacgatgcctgatgcgacgcttgcgcgtcttatcatgcctacagccgttgccgaacgtaggctggataaggcgtttacgccgcatccggcaattctctgctcctgatgagggcgctaaatgccgcgtggcctggaattattgattgctcaaaccattttgcaaggcttcgatgctcagtatggtcgattcctcgaagtgacctccggtgcgcagcagcgtttcgaacaggccgactggcatgctgtccagcaggcgatgaaaaaccgtatccatctttacgatcatcacgttggtctggtcgtggagcaactgcgctgcattactaacgaccaaagtacggacgcggcatttttactacgtgttaaagagcattacacccggctgttgccggattacccgcgcttcgagattgcggagagcttttttaactccgtgtactgtcggttatttgaccaccgcagccttactcccgagcggctttttatctttagctctcagccagagcgccgctttcgtaccattccccgcccgctggcgaaagactttcaccccgatcacggctgggaatctctactgatgcgcgttatcagcgacctaccgctgcgcctgcgctggcagaataaaagccgtgacatccattacattattcgccatctgacggaaacgctggggacagacaacctcgcggaaagtcatttacaggtggcgaacgaactgttttaccgcaataaagccgcctggctggtaggcaaactgatcacaccttccggcacattgccatttttgctgccgatccaccagacggacgacggcgagttatttattgatacctgcctgacgacgaccgccgaagcgagcattgtttttggctttgcgcgttcttattttatggtttatgcgccgctgcccgcagcgctggtcgagtggctacgggaaattctgccaggtaaaaccaccgctgaattgtatatggctatcggctgccagaagcacgccaaaaccgaaagctaccgcgaatatctcgtttatctacagggctgtaatgagcagttcattgaagcgccgggtattcgtggaatggtgatgttggtgtttacgctgccgggctttgatcgggtattcaaagtcatcaaagacaggttcgcgccgcagaaagagatgtctgccgctcacgttcgtgcctgctatcaactggtgaaagagcacgatcgcgtgggccgaatggcggacacccaggagtttgaaaactttgtgctggagaagcggcatatttccccggcattaatggaattactgcttcaggaagcagcggaaaaaatcaccgatctcggcgaacaaattgtgattcgccatctttatattgagcggcggatggtgccgctcaatatctggctggaacaagtggaaggtcagcagttgcgcgacgccattgaagaatacggtaacgctattcgccagcttgccgctgctaacattttccctggcgacatgctgtttaaaaacttcggtgtcacccgtcacgggcgtgtggttttttatgattacgatgaaatttgctacatgacggaagtgaatttccgcgacatcccgccgccgcgctatccggaagacgaacttgccagcgaaccgtggtacagcgtcagcccgggcgatgttttcccggaagagtttcgccactggctatgcgccgacccgcgtattggtccgctgtttgaagagatgcacgccgacctgttccgcgctgattactggcgcgcactacaaaaccgcatacgtgaagggcatgtggaagatgtttatgcgtatcggcgcaggcaaagatttagcgtacggtatggggagatgcttttttgagtaaagcttccatataatttttctccgcaatgtatcgagggttatccgtaaagccaaagctttcagccatcttatttaatgtattaaggattaattcagcaataacccggtgaccaaattcaaaagccaactcaaaggcagagtatttttgtggggctttgtgttgccaaaaatccataatatcttcagcggtaaatccaaacaggcgtgcatggtcagataaagcaagataaaccgtctctacaacattttgttgtttatgctgtatcgcactaaacaaaccgggatattcattagaattatttgccaggaggaggggcttcatattttttttatcgaatttaaacgtattaaacagagtgggtaatgcgttaaaaatagtattaataacgttcatgtgtccgcgctgcatggccataaacaaacccgtgtcgcgcgcaagacttttagcggtcagaagatctacaatatcggaagcactaatgttaatttcctgggctaggctgggcaatgcttcaagaataactttcacgatatcgctatgtccattttgcatcgccagatatagtcctgggcaaccataaaaatcctttgccttcaggagatcgagtacctgttctttagtcaaatgacatgtgcgaattaacaaaggtaacgcgttcaaaacaattttcagcatgtcggcatcaccattcgccataacatggtataaaacatggctggacgttctatttttggcactcaggaatttatacacttgttcgttatctaaatgatgtgttgcggccagtttaggtaaggcgttcagaatgctggttacaacatttttatccttacgacttatcgctaaaaataatccagaaaaaccatttttatcttttgcctccagaatatgcatgagattttttttgctgagtaatccttcatatcctgtttcactcaaactattgaaaatagtctcaacgatatccgcattaccataatttatagccaaatataaacctggcaggttaatactattataggcagtcaacatttctgttctatgtagttctggcattttctggagttgaatcatcagttgcgtaagttggtgattctgaccaattgccattagcaaattcatcgttgcaggacttaatggaggggttatttcatccacagatccttttaacatcaatagctgttctttcggaagtgctggaattattgcaacagattgattaataacatgatcattactccatttcaggaggctataatctacattcataaaatccatcagagaatagtgtttaatattctctttgctttcgctcataattcttattttatcgttagttacattaggatcataaacgctaaccacgtaatgggtacatccttcagttgtgttctttattcttagccggaccgtcaaagcatggttatccaccagtaatatggctgccataacactgatgccattactttccatcttgtcaaaatatgctttcataactagcccgaaatcaccgcaggcagcaacgcaacgcccctcaggacggctggaaaccaacgccaaagtctggtttttgcattttttgttgaagtgcgtgagaaatttttcagcactagagtaatcatcttgatggggtttgtaatcaacattctgataaatatcattaatatattgtgcagcaatgtgtcggcatactatacggttttggggtcgccccggaaaataacattgaccattaagtttaattcttgggaattctttttcttttctatcactttttaggtttaattcttgtttatcaagagtgtcactgcgttgaggtaaaatttccattaggtatttttcaaatattggggcaatggtttgagtaagtgtcgtgttttcgtttttattaattatcgtaatttctttcttatcagcttgtaagacggacgtggaaaatttaatgacaaaatccttgttgctaaagatatgacgaccattttgtctacagttctcactgaagctttttaatagaggcgtcgccagctccttgccagaaaatttatcctcgagttctttataaaacaattcactcagggtttggtgttcatttgtctgggctgtattattaatatttgcagagaaagaactacgaggaatacgagtaatcatttaaatatctcattgtttattgatgtcttgaattttaactatcagaacagtgaaaaaatttaatatgattacaactaaagaaatatcataaatcgctcaatctcataatgcagccgtaaaagtttcggtggaatgagatcttgcgattttgttaataattaagtggtttgatgtttaaaaataatgctgagttaataaaagtgtgtgaagtgtatgacattaagttattttggcgtcaatgcgattaacagacacccttattctattgccactcaggtatgatgggcagaatattgcctctgcccgccagaaaaagtcagcgcattccaccgtacgccagcgtcacttccttcgccgctttaatcaccatcgcgccaaactcggtcacgcggtcatcggtaatacgactaatcggtccggaaatagaaattgcggcaaacggttcacggtgctcatcgaaaatacacgctgcaaggcaacgtagccccagtgcatgttcctcatcgtcaaaactataaccccgtttgcgcgtttgggcgagatcttcttttaaatgcacaggagacaccagcgttgcgtgggtataggcatgtaaccctttgcggtgcagcagcttcgtcacctgttcttcgctcagttgggctaaaaaggctttacccgcaccggaagcgtgcatcggcaatttaccgccgataggcgcggacattcgcatcagatgcgtacactgtacctggtcgataataatcgcttcgtgatcgctttgatcaagcaccgccatattgaccgtttcgccagactcttccattagattgcgcaggatagggtgaacaatcgctaacaaattacggctctggagaaagctgctgccgaccataaaggcatgtgcgccgattgcccaatgtcccagttcgccaacctgacgcacgaaaccctgctgttgcatcgtggttagcaggcggtgggtcgtggaattgggtaacccggcttgttgcgccagttccgtgagtgccacactgccattggattcggcaatccactccagtaatttcaggccacgcgttaaagactgaacctgtccagtcgctggtgcggtggcaacggcgggttttctgccgcgtttcgcgggaatgggtgcgaccatgacagtctcttttttctgtatcgtggaaatcattttcatttttattgttagctaatgcaatagttactgaactgatccgatgagttaatgttgaacaaatctcatgttgcgtggtggtcgcttttaccacagatgcgtttatgccagtatggtttgttgaatttttattaaatctgggttgagcgtgtcgggagcaagtgtgagcagcaaagtggaacaactgcgtgcgcagttaaatgaacgtattctggtgctggacggcggtatgggcaccatgatccagagttatcgactgaacgaagccgattttcgtggtgaacgctttgccgactggccatgcgacctcaaaggcaacaacgacctgctggtactcagtaaaccggaagtgatcgccgctatccacaacgcctactttgaagcgggcgcggatatcatcgaaaccaacaccttcaactccacgaccattgcgatggcggattaccagatggaatccctgagcgcggaaatcaactttgcggcggcgaaactggcgcgagcttgtgctgacgagtggaccgcgcgcacgccagagaaaccgcgctacgttgccggtgttctcggcccgaccaaccgcacggcgtctatttctccggacgtcaacgatccggcatttcgtaatatcacttttgacgggctggtggcggcttatcgagagtccaccaaagcgctggtggaaggtggcgcggatctgatcctgattgaaaccgttttcgacacccttaacgccaaagcggcggtatttgcggtgaaaacggagtttgaagcgctgggcgttgagctgccgattatgatctccggcaccatcaccgacgcctccgggcgcacgctctccgggcagaccaccgaagcattttacaacagtttgcgccacgccgaagctctgacctttggcctgaactgtgcgctggggcccgatgaactgcgccagtacgtgcaggagctgagtcggattgcggaatgctacgtcaccgcgcacccgaacgccgggctacccaacgcctttggtgagtacgatctcgacgccgacacgatggcaaaacagatacgtgaatgggcgcaagcgggttttctcaatatcgtcggcggctgctgtggcaccacgccacaacatattgcagcgatgagtcgtgcagtagaaggattagcgccgcgcaaactgccggaaattcccgtagcctgccgtttgtccggcctggagccgctgaacattggcgaagatagcctgtttgtgaacgtgggtgaacgcaccaacgtcaccggttccgctaagttcaagcgcctgatcaaagaagagaaatacagcgaggcgctggatgtcgcgcgtcaacaggtggaaaacggcgcgcagattatcgatatcaacatggatgaagggatgctcgatgccgaagcggcgatggtgcgttttctcaatctgattgccggtgaaccggatatcgctcgcgtgccgattatgatcgactccagtaaatgggacgtcattgaaaaaggtctgaagtgtatccagggcaaaggcattgttaactctatcagcatgaaagagggcgtcgatgcctttatccatcacgcgaaattgttgcgtcgctacggtgcggcagtggtggtaatggcctttgacgaacagggacaggccgatactcgcgcacggaaaatcgagatttgccgtcgggcgtacaaaatcctcaccgaagaggttggcttcccgccagaagatatcatcttcgacccaaacatcttcgcggtcgcaactggcattgaagagcacaacaactacgcgcaggactttatcggcgcgtgtgaagacatcaaacgcgaactgccgcacgcgctgatttccggcggcgtatctaacgtttctttcagcttccgtggcaacgatccggtgcgcgaagccattcacgcagtgttcctctactacgctattcgcaatggcatggatatggggatcgtcaacgccgggcaactggcgatttacgacgacctacccgctgaactgcgcgacgcggtggaagatgtgattcttaatcgtcgcgacgatggcaccgagcgtttactggagcttgccgagaaatatcgcggcagcaaaaccgacgacaccgccaacgcccagcaggcggagtggcgcagctgggaagtgaataaacgtctggaatacagcctggtcaaaggcattaccgagtttatcgagcaggataccgaagaagcccgccagcaggctacgcgcccgattgaagtgattgaaggcccgttgatggacggcatgaatgtggtcggcgacctgtttggcgaagggaaaatgttcctgccacaggtggtcaaaagcgcgcgcgtcatgaaacaggcggtggcctacctcgaaccgtttattgaagccagcaaagagcagggcaaaaccaacggcaagatggtgatcgccaccgtgaagggcgacgtccacgacatcggtaaaaatatcgttggtgtggtgctgcaatgtaacaactacgaaattgtcgatctcggcgttatggtgcctgcggaaaaaattctccgtaccgctaaagaagtgaatgctgatctgattggccttagcgggcttatcacgccgagcctggacgagatggttaacgtggcgaaagagatggagcgtcagggcttcactattccgttactgattggcggcgcgacgaccagtaaagcgcacacggcggtgaaaatcgagcagaactacagcggcccgacggtgtatgtgcagaatgccagccgtaccgttggtgtggtggcggcgctgctttccgatacccagcgcgatgattttgtcgctcgtacccgcaaggagtacgaaaccgtacgtattcagcacgggcgcaagaaaccgcgcacaccaccggtcacgctggaagcggcgcgcgataacgatttcgcttttgactggcaggcttacacgccgccggtggcgcaccgtctcggcgtgcaggaagtcgaagccagcatcgaaacgctgcgtaattacatcgactggacaccgttctttatgacctggagcctggccgggaagtatccgcgcattctggaagatgaagtggtgggcgttgaggcgcagcggctgtttaaagacgccaacgacatgctggataaattaagcgccgagaaaacgctgaatccgcgtggcgtggtgggcctgttcccggcaaaccgtgtgggcgatgacattgaaatctaccgtgacgaaacgcgtacccatgtgatcaacgtcagccaccatctgcgtcaacagaccgaaaaaacaggcttcgctaactactgtctcgctgacttcgttgcgccgaagctttctggtaaagcagattacatcggcgcatttgccgtgactggcgggctggaagaggacgcactggctgatgcctttgaagcgcagcacgatgattacaacaaaatcatggtgaaagcgcttgccgaccgtttagccgaagcctttgcggagtatctccatgagcgtgtgcgtaaagtctactggggctatgcgccgaacgagaacctcagcaacgaagagctgatccgcgaaaactaccagggcatccgtccggcaccgggctatccggcctgcccggaacatacggaaaaagccaccatctgggagctgctggaagtggaaaaacacactggcatgaaactcacagaatctttcgccatgtggcccggtgcaagcgttagcggttggtacttcagccacccggacagcaagtactacgctgtagcacaaattcagcgcgatcaggttgaagattatgcccgccgtaaaggtatgagcgttaccgaagttgagcgctggctggcaccgaatctggggtatgacgcggactgattcacaaatctgtcacttttccttacaacaaacagggcgctcaatgagtgccctgtctctttattaatatgaaacacttatactggaaacaggctggaataatcttagccggaaaaacgaatgtcaaaaggcacagtaaagatgccagtcagcgtgtttccggtcctttggtcattcaattgcttcaggaacatataacgataaggagaacctgaactcgtgttaacgctgcttcacctgctttctgccgtcgccctgctggtctgggggactcatattgttcgaaccggcgtaatgcgcgtcttcggcgcgcgtttgcgtactgtccttagccggagcgtcgaaaaaaagccgctcgccttttgcgcggggatcggcgttaccgcactggtacagagcagtaatgccaccaccatgctggtgaccagctttgtcgctcaggatctggtagccctcgcaccggctctggtcattgtgctgggtgcagatgtcgggacggcgctaatggcgcgtattctcaccttcgacttatcctggctgagtccgttacttatttttatcggcgtgatttttttcctcggacgcaaacagagtcgcgccgggcaactgggccgcgtcggtattggtcttgggctgattttgctagcgctggagttgattgtgcaggccgtaacgccgatcacccaggcaaacggcgttcaggtgatctttgccagcctgaccggcgatattctgctggatgcgctgattggcgcgatgttcgccattatcagctactccagccttgctgctgtactgctgaccgcgactctgaccgccgcaggcattatctccttccccgtggcgctctgtctggtgattggtgctaacctcggttccggtctgctggcaatgctcaacaacagtgccgccaatgccgcagcccgccgtgtcgcgctgggtagtctgctgtttaagctggtgggtagcctgattatcctgccgtttgtccatttgctggcagagacaatggggaagttgagtttgccaaaagcggaactggtgatctatttccacgtcttctacaaccttgtacgttgcctggtcatgctgccatttgttgacccgatggcacggttttgcaaaacgattattcgcgatgaaccggaactggatacccagctacggcctaaacatctggatgtcagcgcgctggatacgcccacgcttgctctggcgaacgccgcgcgcgaaaccctgcgcattggcgacgccatggaacagatgatggaagggttgaataaagtgatgcacggtgagccacggcaggagaaagagctgcgtaagctggcagatgatatcaacgttctctacaccgccattaagctgtatctggcgcggatgccaaaagaagagctggcggaggaagagagccgccgctgggcagagatcatcgaaatgagcctcaaccttgaacaggcctccgatatcgtcgagcgcatgggcagcgaaattgctgacaaaagtctggcagcacggcgggcatttagccttgatgggttgaaggaactggatgcgctctatgagcaattgctcagtaatttaaagctggcaatgagcgtgttcttctctggcgatgtcaccagcgctcgtcgtttgcgtcgcagcaaacatcgttttcgcattcttaatcgccgctattcccacgcccacgtcgatcgcctgcatcagcaaaacgtgcagagcattgaaaccagtagcctacatttaggcttactgggagatatgcagcgcctgaacagcctgttttgtagcgtggcttacagtgtgctggaacagccggatgaagatgaaggacgggacgagtattaatattgtgaatcctgtaggcctgataagacgcgtcaagcgtcgcatcaggcactatgaacaagatgccggatcatgcatccggcaattcacttaaaaacggtgaccagcttccagcggaaccgcttcttcaccagccttaaacacataagtggtgttcgggccacccagcgtagcgtgacctttactcactgtgatccagttaccttccggtagaccaataatcgtcagttctggcgcgacgaccagcagttcgcgaatacgctgctcacgggtttcacctttatggccttccggcagcgcgttggtgaagtgcgggttgatttgcagcgggaacagatttagcgcatcgaaaccttgcggatcgacaatcggcatatcgttggtggtacgaatagttgggcaagcaaggttagcgcctgcgctccagccaatatacagagcgccacgtttaaccacgtcagtaattggtgccagcagcccgcgctcgcggcactgtttcagcaactggaaagtattcccgccgccgacaatcacgatctcagcattttcaatcgcggcaacgggatcgacaacgctatgaataccggtgacagaaacacccagcggagcgagaaccgcagccgttttcgctgtgtaatcatcccaggtctgcgttacgccagcgaaagggataaacaccgcactgcggcgaccctgcaactgttcagcaattagcggcagtgcatgttccagccaggctttacccggcagcgtgctgttactcaataaaagcagttccattacttctccggttagtaagaaatcacgggaggcatgctaccactgcgaatttaaccacttactgacatggctcacgatgtcgcacattgcttctggaaagtgatttgagcaggtaacgaattcaagccaatggaaataacaaatagttcgctcatgactattttttatcaacccaaaggtacggtatattccgttttttacaggagaatttatgctgcccgacagtagtgtccgtttaaataaatacatcagcgaaagcggaatttgcagtcgccgcgaagcggatcgctatatcgagcaaggcaatgtgttccttaatggcaagcgagccaccattggcgatcaggtgaaacccggcgacgttgtgaaagtaaacggtcagttgattgaacctcgggaagccgaagatttggtacttatcgccctgaacaagcccgttggtattgtaagcaccaccgaagatggcgagcgcgataacattgtcgatttcgttaaccacagcaaacgcgtgttcccgattggccgcctggataaagactcccaggggctgattttcctcaccaatcacggcgatctggtgaataagatcctgcgtgctggcaatgatcatgagaaagagtatctggtgacggtcgataaaccgattaccgaggagtttattcgcggcatgagtgcgggggtgccaatcctcgggacagtgaccaaaaagtgcaaagttaaaaaagaagcgccgtttgtcttccgcattaccctggtgcaggggctgaaccgtcagatccggcgcatgtgcgagcatttcggctatgaagtgaaaaagctggaacgcacgcgcatcatgaacgttagcttaagcggcattccgctgggggaatggcgcgatttaaccgacgatgagttaatcgacctctttaagctcattgaaaattcctcttccgaggtaaaacctaaagcgaaggccaaaccgaaaacagcgggcatcaaacgtccagtcgttaagatggaaaaaacggcggaaaaaggcggtcgcccggcgtccaacggtaagcgttttaccagcccggggcgtaaaaagaaggggcgctgattaacgcctcagactgatgaaaacggcccaaaagtgcccggacagtcccctcgccccttcgggaaaagggttagggtgaggggaaaattgtgttcacactgacgagtgaaaatctcaggcgttgattgtggattagcgcctgccgcgcgtgctcgtatttgcactccagctaaaactcgcttcaggatccggtttataagcctgctttttcttcaactggcgggcttttttcgcttcagcctcacgctcaaccattaatttatcgatgtaatctttcttaatgctgttggtttcggagttggtcaatacgcgaccatgcgcaatccgcgcccgatccagcagtgttttaagttcacgctgctcgcgttcagtcatctctttttgggtaatacgggggagtgccatgatggtgccctcagtgagccagagagttcagtgtacgggaattcgtttgcgagcagaactgataatattcattttgccttctcttaactatttatctctttcgataattaattagagatgcagataaaaaaattaaaggcaattattctccgataaagacgctggttaacagagtacaggctcgtttattgatgagcatagtgacaagaaaatcaatacggcccgaaatatagcttccaggccatacagtatttactcaaacaaattactatgcagtttttgcaccacctgctcggcatcttcgccgggcaccaggaagcacaggttatggctggatgcgccataacaaatcatgcgaatgttgaacggttccagtacgccgaatacctctttgccaacgccgcaggctttactcaggtcattgccaatcaacgcgaccagcgccagaccttcttccacctccacccgacacagtgcggaaagctccatcagcagagattgcgtcagcaacgtatcgccagtggaggtactaccggtggtatcaagggttaatgccacgctcacttcactcgtggtgattaagtctacgctaatattatgccgcgcgaggatgccgaaaacttccgcgaggaaaccgcgagaatgcagcatattcaggctgtgcaaagtgagcagagtctgattgcgacgaagcgccagagcgcggaacagcggcggattttcagttttattgcacaccagcgtaccacctgcgcgtgggtctttgctggagccgacaaagaccgggatatcgctgcgtactgcgggtagcaacgttgccggatgcagtacttttgcaccaaaagttgccatctctgccgcttcggcaaacgcgatttcatcaatgcgttttgctgcggaaactacgcgtggatcggtggtgtagatgcccgggacgtcggtccagatatcaacacgagatgcgtgtaaagcctccgccagcaaggctgccgtataatcgctgcctccacggccaagcgtcgttgtacgacctttattttcgctaccgataaatccctgggtgatcactaagccttcattgagacgtgggagcagctgcagcgcggccagttccgccagcgcggctatatctggctctgcacgaccaaatcggtcgttggtacgcatcactttacgtacatcaaaccactgtgcctgaacatcgcgttcgcgcaggatctcaacaaacagcagggtgctcatcagctcgccgtggctgaccagctcatctgtcagcgccggagacgttgccagcgccgccgcttctgccagaacagtaatgttctccagcagacgttcaatctcttcacggataacgttcgggtaacgcagacgttccagaatggcaaactggatgttgcggatagcgtcgagtttttcgaatcgctcgccaggttccagtccttcagctaaagcgaccagcagattagtgataccagcagaagcgctgaggacaactaaacgcacgttggcatcagaaagcacaatatcagcgctgcggttcatggcgtcaaaatcagctacgctggtaccgccaaatttggagacaacaatttcagacataactacctcgtgtcaggggatccattttcagccttggcacaagggaagagcggaagacgggtgggcgcagagcgatacttcgctactattttcacccagaagtgctccaccacttgcgaaacgcccgactgcgaacgcttctggtgacaacccaggggattcagcccctgtagccgatgatgaacgtggccagccgttcaatcacctcggcgatgcaccccctcaggtgttatcacaggactggctcctccaacaccgttacttgggcaacgcgcctcttctggcctgcgctagcgcaggtagtacatttataaataaagggtgagcggggcggttgtcaacgatggggtcatgcggatttttcatccactcctggcggtcagtagttcagctaataaatgcttcactgcgctaagggtttacactcaacattacgctaacggcactaaaaccatcacatttttctgtgactggcgctacaatcttccaaagtcacaattctcaaaatcagaagagtattgctaatgaaaaacatcaatccaacgcagaccgctgcctggcaggcactacagaaacacttcgatgaaatgaaagacgttacgatcgccgatctttttgctaaagacggcgatcgtttttctaagttctccgcaaccttcgacgatcagatgctggtggattactccaaaaaccgcatcactgaagagacgctggcgaaattacaggatctggcgaaagagtgcgatctggcgggcgcgattaagagcatgttctctggcgagaagatcaaccgcactgaaaaccgcgccgtgctgcacgtagcgctgcgtaaccgtagcaataccccgattttggttgatggcaaagacgtaatgccggaagtcaacgcggtgctggagaagatgaaaaccttcagtgaagcgattatttccggtgagtggaaaggttataccggcaaagcaatcactgacgtagtgaacatcgggatcggcggttctgacctcggcccatacatggtgaccgaagctctgcgtccgtacaaaaaccacctgaacatgcactttgtttctaacgtcgatgggactcacatcgcggaagtgctgaaaaaagtaaacccggaaaccacgctgttcttggtagcatctaaaaccttcaccactcaggaaactatgaccaacgcccatagcgcgcgtgactggttcctgaaagcggcaggtgatgaaaaacacgttgcaaaacactttgcggcgctttccaccaatgccaaagccgttggcgagtttggtattgatactgccaacatgttcgagttctgggactgggttggcggccgttactctttgtggagtgcgattggcctgagcattgttctctccatcggctttgataacttcgttgaactgctttccggcgcacacgcgatggacaagcatttctccaccacgcctgccgagaaaaacctgcctgtactgctggcgctgattggcatctggtacaacaatttctttggtgcggaaactgaagcgattctgccgtatgaccagtatatgcaccgtttcgcggcgtacttccagcagggcaatatggagtccaacggtaagtatgttgaccgtaacggtaacgttgtggattaccagactggcccgattatctggggtgaaccaggcactaacggtcagcacgcgttctaccagctgatccaccagggaaccaaaatggtaccgtgcgatttcatcgctccggctatcacccataacccgctctctgatcatcaccagaaactgctgtctaacttcttcgcccagaccgaagcgctggcgtttggtaaatcccgcgaagtggttgagcaggaatatcgtgatcagggtaaagatccggcaacgcttgactacgtggtgccgttcaaagtattcgaaggtaaccgcccgaccaactccatcctgctgcgtgaaatcactccgttcagcctgggtgcgttgattgcgctgtatgagcacaaaatctttactcagggcgtgatcctgaacatcttcaccttcgaccagtggggcgtggaactgggtaaacagctggcgaaccgtattctgccagagctgaaagatgataaagaaatcagcagccacgatagcagcaccaatggtctgattaaccgctataaagcgtggcgcggttaatcatcgtcgatatgtaggccggataaggcgttcacgccgcatccggcaaccgatgcctgatgcgacgcggtcgcgtcttatcaggcctacaggtcgatgccgatatgtacatcgtattcggcaattaatacatagcacgattgattaaataaccttaataacaatgccgacgttatgtcggcatttttttatcagataaatccccttgtctgtaatttaacggaaatcataccgtgaggttaatcctaaaatagatttttaatcgttgtttatttcggaaaatacgcagattaattgcttttgtttttattttaagtttatgatttttattgttatttaaatataagttgaaacttatatttgatattcattccaattatcctaaaacgccatcgctaattccccgcgccgtaattcgcatgctttagttgtgtatactcgatcccgcccgaaatgtttttgggtaaatctccattcattcaatgaagggaaattgttatgaaaaaagttctgtatggcatttttgccatatctgcgcttgcggcgacttctgcgtgggctgcacctgtacaggtgggcgaagcggcagggagcgcagcaacgagcgttagcgcggggagttcctccgcgaccagcgtcagcaccgtaagcagcgcggtgggtgtcgcgcttgcggcaaccggtggcggtgatggttctaataccgggaccaccacaaccacgaccaccagtacccagtaataaagtatgtatccccaaaataattcgagtcattgcatctgtggctagaagtatgaagggattaaccataaccacactccggtgtggttattctgcccctctggagaagagtcgtgaagcgacctgcactcattcttatctgcctgttattacaggcctgtagtgccacgactaaagagctgggcaatagtctgtgggacagtctgttcggcacgccaggcgtacagctgacggatgatgatattcaaaatatgccctacgccagccagtacatgcagcttaatggcgggccgcagttatttgtggtgctggccttcgctgaagacggacaacaaaaatgggtcactcaggatcaggctactctcgttacccaacatggccgtctggtgaagactctgctcggcggcgacaacctgattgaagtgaataaccttgctgccgacccgctgattaaacccgcacaaatcgttgatggcgcaagctggacgcgcacgatgggctggaccgagtaccagcaggtacgctacgccaccgcacgcagtgtcttcaaatgggatggcaccgataccgtcaaagtcggcagcgatgaaaccccggttcgcgtgctggacgaagaagtctccaccgaccaggcgcgctggcataaccgctattggatcgacagcgaagggcaaattcgccagagcgaacagtatctcggcgcggattattttccggtgaaaaccactctcatcaaggcggcaaaacaatgattaaacaaactattgtcgcgttgcttttgagtgtgggagcgagtagcgtcttcgcggcaggaaccgtcaaggtgttcagcaatggcagcagtgaggccaaaacgctaacgggcgcagagcatttaatcgatctggtaggccaaccgcggctggcaaacagctggtggcccggtgcggtgattagcgaagagctggcaacggcggcagcattgcgtcagcagcaggcgttgctgacacggctggcagaacagggcgcagattccagcgccgacgatgccgctgcgattaacgccttacgccagcaaattcaggcgttgaaagtgacgggcaggcaaaaaatcaatcttgatcccgatatcgtccgcgttgccgaacgcggtaacccgccgttgcagggcaactacacgctgtgggtcggaccaccgccgtccacggtcacgttgttcgggcttatcagccgtcctggcaagcagccattcactccaggtcgcgacgtggcgagctatctctctgaccagagcctgctcagcggtgcggatcgcagctacgcgtgggtggtttacccggacggacgcacgcaaaaagcgccggtggcttactggaacaagcgtcacgtagagccgatgcccggcagcattatttatgttggcctcgcggactccgtctggagtgagacgcctgatgcccttaacgccgacattcttcagactctgacgcagcggatacctcaataatgaaaaaaagacatctgcttagcttactggcgctgggcattagcacagcttgctacggcgaaacatatcctgcgcccattggtccgagccagagcgatttcggtggcgtaggattattacaaacgcccaccgcgcgtatggcacgggaaggggagttgagtctgaactatcgcgataacgatcagtaccgttattacagtgctagtgtgcaactcttcccgtggctggaaacaacgctgcgctacaccgacgtgcgcacccggcagtacagcagcgtcgaagcgttctctggcgatcaaacgtataaagataaagccttcgatctcaaactgcgtttgtgggaagagagttactggctgccgcaagtggcggttggtgcgcgggatatcggcggtacggggctgtttgatgcggaatatcttgttgccagcaaagcctgggggccgttcgattttacgctcggcctgggctgggggtatttgggcaccagcggtaatgtgaaaaatccgctctgtagtgccagtgataaatattgctatcgcgataacagctacaaacaggcgggatctatcgacggtagccagatgttccacggtcctgccagtctgtttggcggcgtggaataccagacgccctggcaaccgctgcgcctgaaactggagtatgaaggcaataattatcagcaggattttgccgggaagctggagcaaaaaagtaagtttaacgtcggtgcgatttatcgcgttaccgattgggccgacgttaaccttagctatgaacgtggcaacacctttatgtttggcgttacgttgcgcaccaactttaacgatctgcgcccgtcttacaacgataacgcccgcccgcaatatcaaccgcagccgcaggatgccattttgcagcatagcgtggtggcgaatcagttaacgctgttgaaatacaatgccggacttgccgatccacagatccaggcgaaaggcgatacgctgtatgttaccggcgagcaggtgaaatatcgtgatagccgcgaagggatcatccgtgcgaatcggatcgtgatgaacgatctgccggatgggatcaaaacgatccgcattacggaaaatcgccttaacatgccgcaggtgacgacggaaaccgatgtcgccagcctgaaaaatcatctcgccggagagccgttgggccacgaaacgacgctggcgcaaaaacgcgtcgagccagtggttccgcagtccaccgagcagggctggtatatcgacaaaagtcgctttgatttccatatcgatccggtgctgaaccagagcgtcggtggcccggaaaacttttacatgtatcagctgggcgtgatgggaacggcagatttgtggctgacggaccatctgctgaccaccggcagcctgtttgcaaatcttgccaacaactacgacaagtttaactacactaatcctccgcaggacagccacttaccgcgcgtgcgtacccatgtgcgcgagtatgtgcagaacgatgtctatgtgaataacctgcaagccaactacttccagcatctgggcaacggcttctacggtcaggtctacggtggttatctcgaaaccatgtttggcggtgcgggggcagaagtgttgtatcgcccgctggacagcaactgggcgtttggtctggatgccaactacgttaaacagcgcgactggcgtagtgcaaaagatatgatgaaattcaccgactacagcgtgaaaaccggacatctgaccgcctactggacgccatctttcgctcaggatgtgttagttaaagccagcgtcgggcagtatctggcaggggataaaggcggcacgctggagatcgccaaacgctttgatagcggcgtggtggtgggtggctatgccacgatcactaatgttagcaaagaggagtacggcgaaggggacttcaccaaaggcgtgtatgtcagcgtaccgttggatctcttcagctctggcccgacacgcagccgtgcggcgattggctggacgccgctgacgcgtgacggtggtcagcaacttgggcgtaagttccagttgtatgacatgaccagcgaccgtagcgtcaatttccgctaagtcatgggaaaggtgccagttttcgcactcactggcaccttcattcttaatggcctgtcgagccatcaggaacgcagttcactcccggtttgcgatctggtgtgtaaaggcgaaaacattctgtcttcctgtccgtcgatatcggttgcaggtctggttgcctgagcgactgggccatcattgggctggagacattgctttgcggtaggtcggctttatcagcagtaccgagcggaccagcataagcaggaagaacagagactgataacatcaaagcagcaaaataaggcttcatttttaccacctttatcaggttacgtttcatttgttccagaggaacattgtcgatttttcgcgcattgctggtggctgggaatcacctgaatgggtgatttttgaattaccggctttggtgcggtttgtcttgccggatgcgccgccaggcgcggcttatccggcctacgggtaggtatatccggctttggtggaggcgcgctccaaatccaggttgaacaaaacatacacaaaaaatatagatctccgtcacatttttgcgttatacaggaagctcgccactgtgaaggaggtactgctatgacgagtctctctcgtccgcgcgtggagtttatctccaccattttgcagaccgtactcaatcttggcctgctgtgcctcggcctgattttggttgtcttcctcggcaaagaaacggtgcatctggctgatgtgctgttcgcgccagaacaaaccagcaaatatgagctggtagaaggactggtggtttactttctctatttcgaatttatcgcgctgattgtgaagtactttcagtccggttttcacttcccgctacgttactttgtctatattgggatcaccgccattgtgcgcttgatcatcgtcgatcataaaagcccactggatgtgttgatctacagcgctgcgatcctgttactggtgatcaccctgtggctgtgtaatagcaaacggctgaagcgggagtaaaaagtcagcacgccgaaatggcgcggcgtgctggacaggaagattacagcgtagcagtttgttgtgttttcttcgtttccggttcccagagcgcttccagctcctcaagggttttacctttggtttccgggacaaatttccacataaacagtgctgccagaacgcccatacaaccgtaaatccagtaggagaaaccgttgtggaaatgggccaccagccaggagtttttgtccatcatcgggaaggtccaggagacgaagtagttcgccagccactgggccgccaccgcgattgccagcgctttaccacgaatagcattcgggaagatttcgctcagcagtacccagcataccggaccccaggacatggcaaaggcggcaacatagaacagcatgctcagtagcgccacaatacccggtgcctgagtgtaaaacgcggtaccgaggctaaacataccgattgccattccgagtgcgccgataatttgcagtggcttacgaccaaatttatccaccgtcataattgccagaacggtgaaggtgaggttgataactccgacaataatggtctgcaacagcgcgatatccgtgctggcccccagcgttttgaacacttccggcgcgtagtacagcaccacattgatgccgacaaattgctggaagatggagagcattacgccgattacaatcacgcccacgccaaacatcagcagacgaccaccggttttgcggccatgatccagggagtgtttaatttcctgtactgcctgagttgcaagcgtgttgcccataattttgcgcaggataccttccgcctgttcttgcttgccgcggctcatcagccagcgaggactttctggcacggtatacagcagcattaagaacagcagtgcagggatacattcgctggcaaacatataacgccagccgtcagtattcagccagctggcatcaccggaacgggcaataaaatagtttacgcagtaaactaaaagttgcccgaaaataatcgcaaactggttaaaagagaccagtttcccgcgaatatgagctggagccagttccgcaatatacattgggctgagcatactggctaaaccaacgccaataccgccaataatgcgataaataacaaattccgggacataacctgccagataaacaggcacagtgttgtccgggtttatagaggtaaaaccaagttctggccaggcagaacctacaccagaaataaaaaacaggacagcagcaatcttaagactatcacgacgaccgaagcggttactgcaataaccaccgagggcaccgccgatgatgcaaccaatcagagcgctggccacgcaaaaccctaacagggagttggcagcggattcacttaagttttgtggagcaacaaagacggtattgagactctcaacagtaccggaaataacggcggtgtcgtagccaaataataaaccacctaatgtagcgactaaggtaatgctaaatatataactggaattatactgggtattcattcagacctgccttagaccattctgatcttttatcagtgcattgatgttggaattgtcaggcagttaaggcaattatcattttttacaatgcgtttacgtaatgtcttttctgtgatcttaattgtgataattatccaaaattgataaaaacaatactattgccgtgactcagagcacgaaagagaattatcgtaagtgggaaaacaaataacgtaaaaataataagctctatgatggaaatattaaccggcgaacgattcagattgcagacgaaagaaaaaaaggcgctccgtggagcgccgaataacagtcacaagttgggataacgtaagttgagggtgcagcggcataacattggcagaacaacatctttaacctttcacaccacctgccgtcaggccgttgaccagccagcgttgagccagcaagaagacgatggtgatcggtaatgcagacatcacggcagcggcggcaaagtcaccccacaggtagttttgcgggttgaggtattgctgcatccccacggccagggtgtagctgtttacgtcacgcagtaacaggctcgcgaccggaacttcagtaatggcagcgataaagctcaggatgaataccaccgccagaatcggtacactcagcggcaacaggacaaggcggaaggcctgccacggtgtcgcaccatccagcgcagcagcttcttccaggctactgtcgatggtttcgaaatagcctttgatggtccagacatgcagcgcaatcccacccagatacgcgaaaattacgccgccgtgagtattcaggccaatgaatggaatgtactcacccagacgatcaaacaacgcatacaacgcgaccagactaagtactgccgggaacatctggaaaatcagcattcctttcagcagcgtcgctttgcctggaaagcgcatacgggcgaaagcgtaggcgcaggtggtggagagcgccacaatgccaatcgcggaaatcccggcgacctttacgctgttccacagccacagcagtaccgggaatggcggtggcgtaatgcgaccatcagcctgttcaacgctaaaacctaacgccagtttccagtgatcccaggagatttgctccgggatcaggctgccggtcgcaaagtttccctgacgcaggctgatagcgacgaccatcagcagcgggaacataatcgctgcgataaaaagtagcagtagcaggtgagtaataaataaacgagctttttggcttttcggttggaccattgccatttttgttatctcccttaatcaaacttcattcgcgtggctttcaggttcactatcgccagcgcacccaccagcaggaagatcagcgtggcaattgctgccgccagaccgaagtcctgacccccgccgccttcaaaagcgatgcggtaggtgtagttaacaagcaggtcggtataaccggctggcgtggtcgtgccaagacgatccgggccgccgttggttaacagttgaatcagcacgaagttgttaaagttaaaggcgaagctggcgatcatcagcggcgtcagcggtttaatcagcagcggcagcgtaatcttaaagaagttctggaacggacctgcgccatccattgcactggcttcatacaaatcgtccggaatcgctttcagcaagcccatgcagaggatcatcatgtacggataacccagccaggtattgacgataattagcatcgtgcgggcggtggtcggatcgctgaaccaggcgggcttcacgccaaacagcgcgctcaacatcatgttgatttcaccgaagctctggttaaacaaccctttgaaaatcaagatactaatgaagcttggcaccgcgtagggcagaatcagcaggacgcgatagaccgctttgccgcgcaacgcttcccactgcaccagacacgccagaaccatgccgaccgccaccgttaaaaagacagtgatcaggctgaacaccacggtccagacgaaaatggcgaggaacggtttctgaatgccttcgtcggtaaagacgcgggtaaagtttttccagccggtggtcacggtgtaaccggggcttagcttttcatcaccccagttgccgtcggcggtaatggactggtaaaagccaatttggttattcggacgatatttcacgccgctctgattattcgtcaacgtgccgtcaccgtcgagtgtgtagagcggctgcgtgccagaaaactggcgcagggagctcatcatcactttgttgccatccggcagaatggcggtaatgtcactcagcgcctgacgattctgggtaatcacgcgcagattcgcgcgttcgccttcgggctgggcggtcgtttctttcagttgcagtttttgctcgccgccaaatttaaaagcgtcggagaggtaatttttgccggtttcgccgtcgctgagcgccagttgccactcatcgcccgccgggtaaagaccaaagttataggttttgcctgcttgccaggagcgatctaacaacacttcctgcgcacgttcaaaagtcagctggttagtgctgctgtagttggtgaaggcaatggcgatggtgcagaccagagggaagaggacgaataatcccattccagccattcccgggtaaacatagcgccaggcgtaggctttacgattggcgaaaatatacagccccgcactactcaatatcagcgtggtaatggcgaacaggtattccccttgtgcgtacattaaaacaacaaggtaacccaccagcaggccgagcagacctagcacactccatttcagcgcgtcgctttgccaccaatgtttctttttaatgacatccatggggttcttcctcattccaggacggataaggctttcacgccttatccgacaacaactgcctgatgcgacgctgacgcgtcttatcaggcctacatacgtttcggttttgtaggccggacaaggcgttcacgccgcatccggcatttcacagcattacttggtgatacgagtctgcgcgtctttcagggcttcatcgacagtctgacgaccgctggcggcgttgatcaccgcagtacgcacggcataccagaaagcggacatctgcgggatgttcggcatgatttcacctttctgggcgttttccatggtggcggcaatacgtggatctttcgccaactcttcctcgtaagacttcagcgctacggcacccagcggtttgtctttattaaccgcttccagaccttcatcagtcagcagatagttttcgaggaactctttcgccagctctttgttcggactggcggcgttaatacctgcgctcagcacgccaacgaacggtttggatggttgacccttgaaggtcggcagtaccgttacaccataattcactttgctggtgtcgatgttggaccatgcccacgggccgttgatggtcatcgctgtttcgcctttattaaaggcagcttctgcgatggagtaatcggtgtctgcattcatgtgtttgtttttaatcaggtcaaccaggaaggtcagacccgctttcgcgccagcgttatccacgcccacgtctttaatgtcgtacttgccgttttcatacttgaacgcataacccccgtcagcagcaatcagcggccaggtgaagtacggttcttgcaggttgaacatcagcgcgctcttacctttcgctttcagttctttatccagcgccgggatctcttcccaggtttttggcgggttcggcagcagatctttgttataaatcaggcttaacgcttcaacagcgatcgggtaagcaatcagcttgccgttgtaacgtacggcatcccaggtaaacggatacagcttgtcctggaacgctttgtccggggtgatttcagccaacaggccagattgagcgtagccaccaaagcggtcgtgtgcccagaagataatgtcagggccatcgccagttgccgcaacctgtgggaatttctcttccagtttatccggatgctcaacggtgactttaattccggtatctttctcgaatttcttaccgacttcagcgagaccgttatagcctttatcgccgttaatccagattaccagtttaccttcttcgattttggcgagagcgctggcggaaaacatcatcgtcgttaatgcggataatgcgaggatgcgtgcacctgtttttattttcataatctatggtccttgttggtgaagtgctcgtgaaaacacctaaacggactctagtttctttatacggcaacctctttccatcctccttgcccctacgccccaccgtcgctttgtgtgatctctgttacagaattggcggtaatgtggagatgcgcacataaaatcgccacgatttttgcaagcaacatcacgaaattccttacatgacctcggtttagttcacagaagccgtgttctcatcctcccgcttcctcccccataaaaaagccagggggtggaggatttaagccatctcctgatgacgcatagtcagcccatcatgaatgttgctgtcgatgacaggttgttacaaagggagaagggcatggcgagcgtacagctgcaaaatgtaacgaaagcctggggcgaggtcgtggtaagcaaagatatcaatctcgatatccatgaaggtgaattcgtggtgtttgtcggaccgtctggctgcggtaaaagcactttactgcgcatgattgccgggcttgagacgatcaccagcggcgacctgttcatcggtgagaaacggatgaatgacactccgccagcagaacgcggcgttggtatggtgtttcagtcttacgcgctctatccccacctgagtgtagcagaaaacatgagttttggcctgaaactggctggcgcaaaaaaagaggtgattaaccaacgcgttaaccaggtggcggaagtgctacaactggcgcatttgctggatcgcaaaccgaaagcgctctccggtggtcagcgtcagcgtgtggcgattggccgtacgctggtggccgagccaagcgtatttttgctcgatgaaccgctctccaacctcgatgctgcactgcgtgtgcaaatgcgtatcgaaatctcccgtctgcataaacgcctgggccgcacaatgatttacgtcacccacgatcaggtcgaagcgatgacgctggccgacaaaatcgtggtgctggacgccggtcgcgtggcgcaggttgggaaaccgctggagctgtaccactatccggcagaccgttttgtcgccggatttatcggtagcccaaagatgaacttcctgccggtaaaagtgaccgccaccgcaatcgatcaagtgcaggtggagctgccgatgccaaatcgtcagcaagtctggctgccagttgaaagccgtgatgtccaggttggagccaatatgagcctgggtattcgcccggaacatctactgccgagtgatatcgctgacgtcatccttgagggtgaagttcaggtcgtcgagcaactcggcaacgaaactcaaatccatatccagatcccttccattcgtcaaaacctggtgtaccgccagaacgacgtggtgttggtagaagaaggtgccacattcgctatcggcctgccgccagagcgttgccatctgttccgtgaggatggcactgcatgtcgtcgactgcataaggagccgggcgtttaagcaccccacaaaacacacaaagcctgtcacaggtgatgtgaaaaaagaaaagcaatgactcaggagatagaatgatgattactctgcgcaaacttcctctggcggttgccgtcgcagcgggcgtaatgtctgctcaggcaatggctgttgatttccacggctatgcacgttccggtattggttggacaggtagcggcggtgaacaacagtgtttccagactaccggtgctcaaagtaaataccgtcttggcaacgaatgtgaaacttatgctgaattaaaattgggtcaggaagtgtggaaagagggcgataagagcttctatttcgacactaacgtggcctattccgtcgcacaacagaatgactgggaagctaccgatccggccttccgtgaagcaaacgtgcagggtaaaaacctgatcgaatggctgccaggctccaccatctgggcaggtaagcgcttctaccaacgtcatgacgttcatatgatcgacttctactactgggatatttctggtcctggtgccggtctggaaaacatcgatgttggcttcggtaaactctctctggcagcaacccgctcctctgaagctggtggttcttcctctttcgccagcaacaatatttatgactataccaacgaaaccgcgaacgacgttttcgatgtgcgtttagcgcagatggaaatcaacccgggcggcacattagaactgggtgtcgactacggtcgtgccaacttgcgtgataactatcgtctggttgatggcgcaagcaaagacggctggttattcactgctgaacatactcagagtgtcctgaagggctttaacaagtttgttgttcagtacgctactgacagcatgaccagccagggtaaagggctgagccagggttctggcgttgcatttgataacgaaaaatttgcctacaatatcaacaacaacggtcacatgctgcgtatcctcgaccacggtgcgatctccatgggcgacaactgggacatgatgtacgtgggtatgtaccaggatatcaactgggataacgacaacggcaccaagtggtggaccgtcggtattcgcccgatgtacaagtggacgccaatcatgagcaccgtgatggaaatcggctacgacaacgtcgaatcccagcgcaccggcgacaagaacaatcagtacaaaattaccctcgcacaacaatggcaggctggcgacagcatctggagtcgcccggctattcgtgtcttcgcaacctacgccaagtgggatgagaaatggggttacgactacaccggtaacgctgataacaacgcgaacttcggcaaagccgttcctgctgatttcaacggcggcagcttcggtcgtggcgacagcgacgagtggaccttcggtgcccagatggaaatctggtggtaatagcaaaacctgggccggataaggcgtttacgccgcattcggcaaccaacgcctgatgcgacgcttgcgcgtcttatcaggcctacaacggctgtcaaatgtaggccggataaggcgtttacgccgcatccggcataaaaacaggttgtcattatctgaaaggggcgaaagcccctctgattatcgggtttagcgcgctattgcctggctaccgctgagctccagattttgaggtgaaaacaatgaaaatgaataaaagtctcatcgtcctctgtttaagtgcagggttactggcaagcgcgcctggaattagccttgccgatgttaactacgtaccgcaaaacaccagcgacgcgccagccattccatctgctgcgctgcaacaactcacctggacaccggtcgatcaatctaaaacccagaccacccaactggcgaccggcggccaacaactgaacgttcccggcatcagtggtccggttgctgcgtacagcgtcccggcaaacattggcgaactgaccctgacgctgaccagcgaagtgaacaaacaaaccagcgtttttgcgccgaacgtgctgattcttgatcagaacatgaccccaagtgccttcttccccagcagttatttcacctaccaggaaccaggcgtgatgagtgcagatcggctggaaggcgttatgcgcctgacaccggcgttggggcagcaaaaactttatgttctggtctttaccacggaaaaagatctccagcagacgacccaactgctcgacccggctaaagcctatgccaagggcgtcggtaacagcatcccggatatccccgatccggttgctcgtcataccaccgatggcttactgaaactgaaagtgaaaacgaactccagctccagcgtgttggtaggacctttatttggttcttccgctccagctccggttacggtaggtaacacggcggcaccagctgtggctgcacccgctccggcaccggtgaagaaaagcgagccgatgctcaacgacacggaaagttattttaataccgcgatcaaaaacgctgtcgcgaaaggtgatgttgataaggcgttaaaactgcttgatgaagctgaacgcctgggaagcacatctgcccgttccacctttatcagcagtgtaaaaggcaaggggtaattacgccccacagtgctgattttgcaacaactggtgcgtctcctggcgcacctttttttatgcttccttcctgggatatgagcgattttttatagtaactcacttcttcttcactaagaatatccattatctcaatgccttatcagagattcttttcctttcgccggtagtgtctggacattcaggctacttttccaggttattttatttctgttatgcagaggttttatgataagtcatatcctaaattctggcggcaataactctttgatgaaacatgatgtggtgcaaggaaataatatagtagatcttgatttactacgtaatttaaatggggtgccaggtttaaacagagataactttatttatatcagcaatattttttcaaatataaaacaacggaacgaaaaaatcatgcaataaatatgtttcgtgaagtctcaatcagtaatgatactataagtgtaaaattctacagaaatgaaaaaaattgaatgcgcttgcaattttctgatggataaagatgcgcaggggtatatcgacctgtctgatttggatttaacaagttgtcattttaaaggtgacgttataagcaaggtgtcttttttaagtagtaatctacaacatgtaacattcgaatgtaaagaaattggggattgcaattttactactgcaatagttgataatgtcatatttagatgtcgacgtttacacaatgtgatttttatcaaagcgagtggtgaatgtgtcgatttcagcaaaaatattcttgatacagttgacttcagccagagtcaacttggtcatagtaattttcgcgaatgtcagattagaaatagtaacttcgataattgttatctttacgctagccacttcaccagagcagagtttctgtctgccaaagaaataagttttattaaaagcaatttgacagctgttatgtttgattatgtgcgaatgagcacagggaattttaaagattgcattacagaacaattggaattaactattgattatagtgatatattttggaatgaagatctcgatggttatatcaataacattataaaaatgattgatacattgccagataatgcaatgatattgaaatccgttctggccgtaaaactggtgatgcaattaaaaatacttaatattgttaataaaaactttattgagaatatgaagaaaatatttagccattgtccttatataaaagatcccattatacgcagttatatccattctgatgaagataacaagttcgatgattttatgcgtcaacatcgattcagtgaggtgaatttcgatacccaacagatgatcgattttattaacagatttaatacgaataaatggctaattgataaaaataacaatttttttatccaacttatcgatcaggccttacgaagtacggatgatatgatcaaagcaaatgtttggcatctttataaagagtggattcgtagtgatgatgttagtcctatatttatagaaactgaagataatttaagaacctttaacacgaatgaattaacacgaaacgataatatctttatcctgttctccagtgtcgatgatgggccagttatggtggtaagctcccagcgcttacatgatatgttgaatcctacaaaagataccaattggaattccacgtatatctacaaatccagacatgagatgttgcctgttaatcttactcaggaaacacttttcagctccaaatctcatggtaaatatgcgcttttccccatttttactgcgagttggcgagctcatcgtataatgaataagggtgtttaagtaaaggaaaacatcaccgttcctggcatcctggacggtgatgcccctacggttgccctcgccagcacgggcatcggtaaagcgtaaggttcaacatcgttttaccacttcatgcgattgttgcgtttttgttgcgtattagatcacttaatttgctttacatctcccgtaaacacttttctgcgatacaatgcctttacgttatgtaacggagagttcggcatgagtcaccccgcgttaacgcaactgcgtgcgctgcgctattgtaaagagatccctgccctggatccgcaactgctcgactggctgttgctggaggattccatgacaaaacgttttgaacagcagggaaaaacggtaagcgtgacgatgatccgcgaagggtttgtcgagcagaatgaaatccccgaagaactgccgctgctgccgaaagagtctcgttactggttacgtgaaattttgttatgtgccgatggtgaaccgtggcttgccggtcgtaccgtcgttcctgtgagtacgttaagcgggccggagctggcgttacaaaaattgggtaaaacgccgttaggacgctatctgttcacaagtagcacattaacccgggactttattgagataggccgtgatgccgggctgtgggggcgacgttcccgcctgcgattaagcggtaaaccgctgttgctaacagaactgtttttaccggcgagtccgttgtactaagaggaaaaaaatatggagtggagtctgacgcagaataagctgctggcgtttcatcgcttaatgcgtacggataagccaattggcgcgttactgctgctctggccaacattatgggcgttgtgggtggcgacaccgggcgttccccagctctggatcctggcggtgtttgtcgcgggtgtctggctgatgcgcgctgccggatgtgtggtgaatgattatgctgaccgcaagtttgatggtcatgttaagcgcacggcgaaccgaccacttcccagcggcgcggtaacagagaaagaggcgcgcgcgctgtttgtcgtgctggtactgattagctttttactggtgctgacgctgaatacgatgaccattctgttgagcattgccgcgctagcgctggcgtgggtgtacccgtttatgaagcggtatacccatctaccgcaagtggtgctgggcgcggcgtttggctggagcattccaatggcttttgccgctgtgagtgagagcgtgccattgagttgctggttaatgttcctcgccaatattctctgggcggtggcttacgacacgcagtatgcgatggttgaccgcgatgatgatgtgaagattggcattaaatccacggcaatcctgttcggccaatacgataaattgattattggtattttgcagattggcgtactggcactgatggcgatcatcggtgagttaaatggcttaggctggggatattactggagtattctggtggctggcgcgctgtttgtttatcaacaaaaactgattgccaaccgcgagcgtgaagcctgctttaaagcatttatgaataataactatgttggtctggtactatttttagggctggcaatgagttactggcatttctgatgatgtaaaaaagccggatgatcatccggctttcttctgggttgcctgatgcgcggcgcttctcaggcctacacaacacatcgcaatttattgaatttgcagattatggaaggccggataaggcgttttcgccgcatccggcaattctctctgattacccttcgccctgcgtcgcactctcaatcgtcaaacgcacgtcacttgtaatcaactccgccagcaactgataaaccttcatcgtttctgccggttcggcatcgccgctatcgctgatatacccttcatcacgcagtgtcagcaccagagaactgaacaccgccttgtcgaagaactccggcgcgttgatgccgtgcagcacggagagacgttgcgcgacggtgcggctctctttctccagcgtaccgcggttgatgctcgggttggcactcaacaaccagaaggtgatggcataacgttgcagcgtttcgcgcgcgcctgcggccagcagctgtagcgtgcgagaatgcgccgggttgatatgcaactcatcatcttgcagggtaatcagcccctgacgttgcatctcatttgccagcgcatcaataacgtccggcaactcgtcgcgatcccagcgcaggaacagctccgctttcagcattgggtaaagcacattgacgtgctccatcaatacgtcgcgggagatgtggcgatgctgggtgacgattgccgccatcaggctaggcagcaccaacatatgcgcaatgttgttgcgatagtaggtcatcagcaccgcttgctcgcgcggcagaatgatgatgtcgccgattgtgtctttctcgacttcaaacttgttcatttgcagcgcgtgatcgataagctcgctggcgctggcactaggaacggtagagtccgtggagtagggcacgttgcgcatcagatccaggtagcagttgagttgctcggttaactgctcgcgggtgagactgcgctgacgacttgccagtagcgcagtacagcacaggttcatggcgtttgccgcgcctgcgttgttaatgcgtaccatcagatcggcagcaatattattgaccgtcggcgttaaccatgccggacgcaccgcttcgatgggatcgatagattcacgccagtcaggtacatgctggttaaggtaggtcatcaacggcattggttcaccgaagttgacgtaaccctgaccgagattacgcagcttgcttaaaccgcgcagcatctgcggcaggctctctttctctttcgtcgcgccgcgcagttctttggcgtaagtacccacttccatgacgtgctcataaccgatatagatcggaatcagcgtaatcggacgcgtgccgccacgcagcatcgcctgaatggtcatgctcagcgtaccagttttcggatccagcaaacgccccgtacgggaacgaccgccttccacgaagtactcgacggaataaccacggctgaacagttcgccgagatactcccggaaaacggtggaataaagtttattgcctttaaacgtacggcgaataaagaacgcccccagacggcggaaaatcggcccggcaggccagaaattcaggttgatcccggcggcgatatgcggcggcaccagcccctggtgatacagcacgtaagaaagcagcaggtagtccatgtgactgcggtggcaaggcacatataccagctcatgaccgtcgtgggccagctggcgaacgcgctcagcgttatggacgttgatgccctggtaaagtcggttccaggtgaagcccagaatacggtcagtcaggcgaatcatctcgtaagagaaattcgccgcaatctcttccatcagtgcaatcgcgttctgctgcgctttttcatgggagatttttttgctgcgcgcttcatcttctaccgctttggcaatggcgcgggaggcgagcagcttattaaacagatcctgacgagcaggcaaacgtgggcctacggcagccagacgttgacgggcaaagtgcatacgcgccacgcgcgccagtttctgagcgatagttttatccgtgccgtgttcatccgccatacggcgcaggctaacactcgggctgaaacgcacaaaactgtcgcgaccgagccacagtacagcgaaaaatttctgtacgccgttaagcatacgcagcggcgggttcacttcgcctttttcacgccccggcgcgcgaccaaacatcacgctcactggcaccatctgcacatccagatttgggttgctacggtgcaaatcgagatagtcgtggaacagcttaatagactcttctttcggcgtgtaataggtgaacacacgcggcccgccgtgaatgaacacatagcgcggcagtagcgtgccgtcgatttccagcggctctaacgggtcaggcaagtcatgtgccagacactgggcgcgcaacgtcagcaaatctgctttgctgttgtacggtaaaacgtacataattggacgagaggtatccagccccagttccggggcaggatctgccggaatagacttgctttttaccaggatgcttaatggtaaattcagtaatttgtagtaaattcgtggccagccggacataaacgatgtaaagcctctggttaataatgcaaatgcgcggcaaggatagcagaaagtcatgggaaattctgtggtatccgctcatgtttcgcgcggcgctacgcaaacccgaatcatcggatttaacggtacactgatattgacgctcataatgtaaaaaggttctttcaatggccaataataccactggattcacccgaattatcaaagctgctggctattcctggaaaggtttacgcgctgcatggatcaacgaagcggcattccgtcaggaaggcgtagcggtattgttggcggtggtcatcgcctgctggctggatgtggacgcgattacccgcgtgctgcttatcagctccgtgatgctggtgatgattgtggaaatcctcaatagcgccatcgaagcagtggttgaccgaattggctctgaataccatgagctttccggacgcgcaaaagatatgggatccgctgcggtgctgattgccattatcgtcgccgtgattacctggtgcattctgttatggagccattttggataacccttccagaattcgataaatctctggtttattgtgcagtttatggttccaaaatcgccttttgctgtatatactcacagcataactgtatatacacccagggggcggaatgaaagcgttaacggccaggcaacaagaggtgtttgatctcatccgtgatcacatcagccagacaggtatgccgccgacgcgtgcggaaatcgcgcagcgtttggggttccgttccccaaacgcggctgaagaacatctgaaggcgctggcacgcaaaggcgttattgaaattgtttccggcgcaagtcgcgggattcgtctgttgcaggaagaggaagaagggttgccgctggtaggtcgtgtggctgccggtgaaccacttctggcgcaacagcatattgaaggtcattatcaggtcgatccttccttattcaagccgaatgctgatttcctgctgcgcgtcagcgggatgagcatgaaagatatcggcattatggatggtgacttgctggcagtgcataaaactcaggatgtacgtaacggtcaggtcgttgtcgcacgtattgatgacgaagttaccgttaagcgcctgaaaaaacagggcaataaagtcgaactgttgccagaaaatagcgagtttaaaccaattgtcgttgaccttcgtcagcagagcttcaccattgaagggctggcggttggggttattcgcaacggcgactggctgtaacatatctctgagaccgcgatgccgcctggcgtcgcggtttgttttagttctctcttcatcaggcttgtctgcatggcattcctcactagttctgataaagcactctggcatctcgccttacccatgattttctccaatatcaccgttccgttgctgggactggtcgatacggcggtaattggtcatcttgatagcccggtttatttgggcggcgtggcggttggtgcaacggcgaccagctttctctttatgctgttgctgtttttacgcatgagcaccaccgggctgactgcgcaggcttatggtgccaaaaatcctcaggcattagcccgtacgctggtgcaaccgttgctgttggcgttgggggctggggcgttaattgcgctgctgcgtacgccgattatcgatctggcgctgcatattgttggcggtagtgaggcagtcctggaacaggcgcggcgctttcttgaaatccgctggttaagcgcaccggcgagcctggcgaatctggtattactcggttggttactcggcgtgcaatatgcccgtgcgccagtaattttgttagtggtcggcaatatcctcaacattgtgctggatgtctggctggtgatggggctgcatatgaacgtgcagggcgcggcgctggcgacggttattgcggaatatgcaacattgctgattggtctgctaatggtgcgtaaaatcctcaaactacgcggaatttccggcgaaatgctgaaaactgcctggcgaggaaacttccgtcgcttgctggcgcttaaccgcgatatcatgctgcgtagcctgttgttgcaactctgtttcggcgcgatcaccgtacttggcgcgcgactggggagtgacattatcgctgttaacgcggttctgatgacgctactcacctttaccgcctatgcgctggatggttttgcctacgcggttgaagcgcactccggtcaggcatacggtgcgcgcgacggtagccagttgctggatgtctggcgggcagcgtgccgccagagcgggatcgtagcgttactgtttagcgtggtttatttgctggctggggaacacatcattgcgttactgacgagcttaacccagattcagcagctggctgaccgctatcttatctggcaggtgattttgccggtggttggcgtctggtgttatctgctggacggcatgtttataggcgcaacgcgtgccaccgaaatgcgtaacagtatggcggtggccgccgcaggttttgcgctgacgctccttacgctgccgtggctgggtaatcatgctttgtggctggcattaaccgtctttctggcgttgcgcgggctttctctggcggctatctggcggcgtcactggcgcaatggtacctggtttgccgcaacgtgacggttaaaaattctgaataaataatcctaagccaaattgctgactacacttaatctcacgttcagaagaaaagtgaacgtactctcattcacaacctaacgatgaggtcttgattatgaataaagatgaagccggcggtaactggaaacagtttaaaggtaaagtgaaagagcaatggggcaaactgaccgatgatgatatgacgatcattgaaggtaaacgtgatcaactggtcggtaaaatccaggaacgttatggttatcagaaagatcaggcagaaaaagaggtcgtggattgggaaacccgcaatgaatatcgctggtaattaatccctcctgcccgacgtgtacaaggatgtacgccctcttaacgcggtttctttttcacctgcacagagtgatcatgctggcactgttcaggatgacgacacgcttccacttctacacatgccgcacagagcccatgtgcttcaatcacattatgccgcagggcaaaccccatttttgccgccagcgtatgcataatgtcttccacgccttctgcacactcttctttcactgcgccgcagcgatcgcaaataaacatggcactcgtatgggtgggctgatcgaacagatgacagagcacataactgttggtggattccaccttatgcacaaaaccttgctcaagcagaaaatccagcgcgcgataaaccgttggcggcttggcttgcggttcagcttcgcgcagtaaatcaagcagatcataagcgctgatagcgccatcctgcagactcatcaggcgcaacacttccaggcgctgtggggtcaggcgcacattacgctgcgcgcagattttttcagcctgcgctaataactcctgcgttgtggtcttttccatcgggcacctcaaagtgggggttaagaatgtccttactttaccatgttccaggaaaaacaccgagaacccttattgttgccgtaatgttgattttctgctttgtaggtaaggtgttatgttgccttgtcgtaccattatcaacacgataataattaataattcatttttaaataaattgcttcaagttaactcgctatttatttaactgggtttaaacgcatacctgtagttcagaaattatgagcgatttttgatagtgaccagatggcaaaagaattataaggaggacacggtacgacaaaaaaggtagatgaatcatgttgaagataatacccggtgcaactggatactttaataaaacactcaatagtaatcaattcgataatgaagatgcaatcaaagataaattagataatagaggtagtatcaaaggtaaattaaataatatatatggtaaatctattgattatgcagcgctgcgtcatcgggatataattattgcaaaaatagatttgtttattcaacgaatcacgcataatttatggcatgcacgtaaaaaaatgtgtttttaattgtgcaaataaatgatctcaaaatgtgggtcaataagtatattgacgattgcactgatgaggatttaaacgatcgtgactttattgcaagtgttgttgaccgggctatttttcatttcgcgattaatagtatatgtaatcctggggataataaagatgcaatgcccattgaacaatgtacttttgatgtagaaactaagaatgaccttccctccacggttcagctattttatgaggaatctaaggataatgaacctttagcgaatatacattttcaagcaataggttctggttttttaacgtttgttaatgcctgccaggaacatgatgacaacagcttaaaattatttgctagcctgttaattagtcttagttattctagtgcctacgcagatttaagtgaaacagtgtatattaatgaaaataatgagagctacctgaaagctcagtttgaaaaattatctcaacgtgatatgaagaagtacctgggagagatgaagcgtctggctgatgggggagaaatgaattttgatggctatctggataagatgagtcatctggtgaatgaaggaacgctcgatcctgatattttaagcaaaatgcgagatgctgcaccacaattaattagcttcgcgaagagctttgacccaaccagtaaggaagagattaaaatacttacagacacttctaaattaatttatgatttgttcggggttaaaagcgagaaataatatgtgaagttcttcgatagtatggaaggcattatataaaaggacccaatatttattgggttcttttttctctatcaatactattagcagggagatatatcaccagagtttaatgtgtgattttttatttatcgtcgaacctggattgtttatcattggccttaacaaagttaacggctaataagattatttccatcacttcgtgagagcttcatgccttgagaggatctcaattttcttttgcaatgagacaggcgcttcctgttgttatggtatagtaccccgctattgagcctcctgaatagtgatgctgaataacataaccccatgatatatcgataaaataatctctacatttgaaaatgcacggtaattctgaaatgcaaaaaatcaaccaaaccagcgcaatgcctgaaaaaactgacgttcactggagtggtcggtttagcgttgcaccaatgctcgactggacggacagacattgccgctatttcttgcgtctgctttcccgcaatacgttgctgtataccgaaatggtgaccacaggggcgattattcacggtaaaggtgattatctggcgtacagtgaagaagaacatccggtagcgttgcaactgggcggtagcgatccggcggcgctggcgcagtgtgcaaagctggcagaagcgcgcggatatgatgagatcaacctgaatgtcggctgcccgtctgaccgggtgcagaacggcatgtttggtgcgtgtctgatgggtaatgcgcagctggttgccgactgcgtgaaagcgatgcgcgatgtggtgagcattccggtgacggtgaaaacgcgtattggcatcgacgaccaggacagctatgaatttctctgcgatttcatcaataccgtttccggcaaaggcgagtgtgagatgttcatcatccacgcacgtaaagcctggcttagcgggttaagcccgaaagaaaaccgtgaaatcccgccgctcgattatccgcgtgtgtatcaactgaagcgtgactttccgcatctgacaatgagcattaacggtggtatcaagagcctggaagaggccaaagcacacctgcaacatatggatggcgtgatggtcgggcgcgaggcgtatcagaatccgggtattctggcggcggtagaccgggagatctttggttccagcgataccgatgccgatccggtggcggtagtgcgcgccatgtatccgtacattgagcgtgaactcagccaggggacgtatctcggccatattacccggcatatgttgggcttgttccagggtattcctggcgcgcggcagtggcggcgttatttaagtgaaaatgcccataaagcgggtgcagacattaatgtgctggaacacgcgctcaaactggtggcggataagcgttaacttttcaccaaaaagtagtcaaattcaccacgccctgcgcaccgtcgcggggcgttttgctgttaaatcaatagattatttttggcatgattcttgtaatgccagcaagagatttcatatttgggagagcatcatgctggaactactttttgtgattggcttttttgtcatgctgatggtcaccggcgttagcttgctgggcattatcgccgcgctggttgtggcgacggccattatgttcctcggcggtatgctggcattgatgattaagttgctgccgtggttactactggcgattgcggtggtgtgggttattaaggcgattaaagcaccaaaagtgccgaaatatcagcgttatgaccgctggcgttactaagggattgtgcggatgatcacaacctaaggttttatccttagaacaaaataggaattaataatcaaatctgtcactattgcgcctctaacagattcatcgtgctgtaccctacatacagccgaactataaaaagaaagggcttcccaggtggaagccctatttcttttatggaatcagcaggctggaaccttgcgtcgcccggctttccagaatctcatgcgcacgctgcgcatccttcagcggatatttctgctgctcggcgacatcgaccttaatcacaccgctggcaatcaaagagaacagttcattactggcctcggttaattcctcccgcgtggtgatatagccttgcagggaagggcgtgtcacatacaagctgcctttttgattgagaatgcctaagttcacaccggtaaccgcaccactactgttgccaaaactgaccattaagccgcggcgttgcaggcaatccaggctccgttcccaggtgtctctgcccacggaatcgtacaccacgcgcactttcttaccgccggtgatctcttttaaccgctcgaccagatcctcttcacgatagttaataacctgccacgcgcccgcttttagcgcgctctgcgctttttgcgcggttcctacggtgccgataagtttcgcgcccagggcttttgcccactggcaggcaattaagccaacgccgccagccgctgcgtggaacaggaactgttcatcgggtttaatttcataggttttgcgcagcagataataaaccgttaagcctttcaggaaggatgccgcagcttgctcaaaagaaattgccgcaggcagaatcgccgctttatccgcaataatgttatgcacagagctgtaagcgcctaacgcgctctgcgcatagactacacgatcgcctgccttaatatgctttacaccactgccgactttactcacgatgcctgctgcttcggtgcctaatccgctgggtaggcttggcggcgggtaaaggccgctgcggatatatgtgtcgataaaattgatgccgatggctttattttcgacctggatttcattctccgccggatcggcaggagtgaactctacggcttgaagtacttccgggccaccgtgcttgtgaaattcaattcgtgttgccatgtgtcctccagaacgtatcgtcagggtctgcttcatatgataaagtttcgacccattctttatctcggtaactccattcactatggcaggaaataaacccttcaacaaacagcaggctgaaccccgcgaacgcgatccacaagttgccgggctgaaagtgcctccgcacagcatcgaagcggagcagagcgtgttgggcggtttaatgctagataacgaacgctgggatgatgtagccgagcgtgtggtagcagacgatttttacacccgcccacaccgtcatatctttactgaaatggcgcgtttgcaggaaagcggtagccctatcgatctgattactcttgcggaaagcctggaacgccaggggcaactcgatagcgtcggtggttttgcttatctggcagagctgagtaaaaatacgccaagtgcggctaacatcagtgcctatgcggacatcgtgcgtgaacgtgccgttgtccgtgagatgatcagcgttgcgaatgagattgccgaagctggttttgatccgcaggggcgtaccagcgaagatctgctggatctggctgaatcccgcgtctttaaaattgccgaaagtcgtgcgaacaaagacgaagggccgaagaacatcgccgatgtgctcgacacaaccgtggcgcgtattgagcagttgtttcagcagccacacgatggcgttaccggggtaaacaccggttatgacgatctcaacaaaaaaaccgctggcttgcagccgagcgatttgatcatcgtcgccgcgcgtccgagcatgggtaaaacaacatttgcgatgaacctcgtcgaaaacgcggcgatgttgcaggataaaccggtacttatcttcagcctggagatgccaagtgaacagatcatgatgcgttctctggcgagcctgagccgcgttgaccagactaaaatccgtaccgggcagctcgatgacgaagactgggcgcgcatttccggcaccatgggtattttgctcgaaaaacgcaatatctatatcgatgactcctccggcctgacgccaacggaagtgcgttcccgcgcacgccgtattgcccgtgaacacggcggcatcgggcttatcatgatcgactacctgcaactgatgcgcgtaccggcgctttccgataaccgtacgctggaaattgcagaaatctctcgcagcctgaaagcactggcgaaagaactgaacgtgccggtggtggcgctgtcccagttgaaccgttctctggaacaacgtgccgacaaacgcccggtcaactccgacctgcgtgaatctggctctatcgagcaggatgcggacttgatcatgtttatctatcgtgatgaggtgtatcacgaaaacagtgatttaaaaggcatcgcggaaattattatcggtaaacaacgtaacggcccaatcgggacggtacgcctgacctttaacggtcaatggagccgcttcgacaactatgcggggccgcagtacgacgacgaataataattattttatgaattaggtaattaaagcaaacacttatcaaggaacacaaatgcaagcggcaactgttgtgattaaccgccgcgctctgcgacacaacctgcaacgtcttcgtgaactggcccctgccagtaaaatggttgcggtggtgaaagcgaacgcttatggtcacggtcttcttgagaccgcgcgaacgctccccgatgctgacgcctttggcgtagcccgtctcgaagaagctctgcgactgcgtgcggggggaatcaccaaacctgtactgttactcgaaggcttttttgatgccagagatctgccgacgatttctgcgcaacattttcataccgccgtgcataacgaagaacagctggctgcgctggaagaggctagcctggacgagccggttaccgtctggatgaaactcgataccggtatgcaccgtctgggcgtaaggccggaacaggctgaggcgttttatcatcgcctgacccagtgcaaaaacgttcgtcagccggtgaatatcgtcagccattttgcgcgcgcggatgaaccaaaatgtggcgcaaccgagaaacaactcgctatctttaataccttttgcgaaggcaaacctggtcaacgttccattgccgcgagcggtggcattctgctgtggccacagagccattttgactgggtgcgcccgggcatcattctttatggcgtcagcccgctggaagatcgctccaccggtgccgattttggctgtcagccagtgatgagtctaacctccagcctgattgccgtgcgtgagcataaagccggagagcctgttggttatggtggaacctgggtaagcgaacgtgatacccgtcttggcgtagtcgcgatgggctatggcgatggttatccgcgcgccgcgccgtccggtacgccagtgctggtgaacggtcgcgaagtaccgattgtcgggcgcgtggcgatggatatgatctgcgtagacttaggtccacaggcgcaggacaaagccggggatccggtcattttatggggcgaaggtttgcccgtagaacgtatcgctgaaatgacgaaagtaagcgcttacgaacttattacgcgcctgactagtagggtcgcgatgaaatacgtggattaatcgttctgtaatatttgattgtctgtgccggatgcggcgtgaatgccttatccggccaataaaatcctaaaaattcaataagttgatgttctttcatgctcttataaaggtcgtgcctctggcggatgtacgtttgtcatgagtctcactctgttgctaattgccgttcgctcctgaacatccactcgatcttcgccttcttccggtttattgtgttttaaccacctgcccgtaaacctggagaaccatcgcgtgtttcaaaaagttgacgcctacgctggcgacccgattcttacgcttatggagcgttttaaagaagaccctcgcagcgacaaagtgaatttaagtatcggtctgtactacaacgaagacggaattattccacaactgcaagccgtggcggaggcggaagcgcgcctgaatgcgcagcctcatggcgctagcctttatttaccgatggaagggcttaactgctatcgccatgccattgcgccgctgctgtttggtgcggaccatccggtactgaaacaacagcgcgtagcaaccattcaaacccttggcggctccggggcattgaaagtgggcgcggatttcctgaaacgctacttcccggaaagtggcgtctgggtcagcgatcctacctgggaaaaccacgtagcaatattcgccggggctggattcgaagtgagtacttacccctggtatgacgaagcgactaacggcgtgcgctttaatgacctgttggcgacgctgaaaacattacctgcccgcagtattgtgttgctgcatccatgttgccacaacccaacgggtgccgatctcactaatgatcagtgggatgcggtgattgaaattctcaaagcccgcgagcttattccattcctcgatattgcctatcaaggatttggtgccggtatggaagaggatgcctacgctattcgcgccattgccagcgctggattacccgctctggtgagcaatagcttcagcaaaattttctccctttacggcgagcgcgtcggcggactttctgttatgtgtgaagatgccgaagccgctggccgcgtactggggcaattgaaagcaacagttcgccgcaactactccagcccgccgaattttggtgcgcaggtggtggctgcagtgctgaatgacgaggcattgaaagccagctggctggcggaagtagaagagatgcgtactcgcattctggcaatgcgtcaggaattggtgaaggtattaagcacagagatgccagaacgcaatttcgattatctgcttaatcagcgcggcatgttcagttataccggtttaagtgccgctcaggttgaccgactacgtgaagaatttggtgtctatctcatcgccagcggtcgcatgtgtgtcgccgggttaaatacggcaaatgtacaacgtgtggcaaaggcgtttgctgcggtgatgtaatgcaggaaagcaggctggagctacccagcctgcagtgaaattaaactgtcgtcgctttcactctttctttatagatgatttttttgatgccatcgttctacgtgagagataataaacgttgttagttcttttattgttaagcttatcccaattatctggaattccttatcctgtttttttgggtggagtaataatttctgcacatctaaccattattaaatttaataataagtatcgggtttgttacgatagaatatttctatatcctcaagaatatgctttgccttattgcctgtgactttctgagattcaattatagtatcgttaaattctaatgttaaagagaactcttttttccgctttgtgtaagtttaaccttatattgattaccaatatcaaataaaaaggtcctgtaatgagaataatcacctttaacctcctcggcaaaacagcaaagcgtgcaaatatacataaagtctttcttacccctgattttgttaactaaatcaataaatgcgtgaaaaactttacttgcaatagaacttgatacttcttctccaggtctaaaaaatcttttgcaatttttaactgtgtttctatgtataaaaagaaatctttggcataagagatatctttattatttagtgcatctagctcaacaggtaaagatgtcgttttgttgctattcacatatgatatattcatatcatcatctccatcgcgagtaataaaattaatcaccattgtagggtagggggctggtcaatcagaaatcatctttataaacttcgattgtttttgtaatgctgtatcattaagttcattaaatcgtacagcagataaatgttctatcaaatttcgctcatttgccgaggattcatcataataaacgtaaaattaatgtatccttacatcgagtaataaacattttttatacaaaaaaagacaggaacgtatttactgggttaaatataatcatcctgcttttcatcacaaaaaccgcagataatccttcctttccccggcagctggcgttatggtcagatggtttttgcaacaaatctcacaataaaaagtttcaacatactgactatttagggaaaaatatgcgcaagatcacacaggcaatcagtgccgtttgcttattgttcgctctaaacagttccgctgttgccctggccagttctcctagtccgcttaaccctgggactaacgttgccaggcttgctgaacaggcacccattcattgggttagcgtcgcacaaattgaaaatagcctcgcagggcgtccgccaatggcggtggggtttgatatcgatgacacggtacttttttccagtccgggcttctggcgcggcaaaaaaaccttcagcccagaaagcgaagattatctgaaaaatcctgtgttctgggaaaaaatgaacaatggctgggatgaattcagcattccaaaagaggtcgctcgccagctgattgatatgcatgtacgccgcggtgacgcgatcttctttgtgactggtcgtagcccgacgaaaacagaaacggttagtaaaacgctggcggataattttcatattcctgccaccaacatgaatccggtgatctttgcgggcgataaaccagggcaaaatacaaaaagccaatggctgcaggataaaaatatccgaattttttatggcgattctgataatgatattaccgccgcacgcgatgtcggcgctcgtggtatccgcattctgcgcgcctccaactctacctacaaacccttgccacaagcgggtgcgtttggtgaagaggtgatcgtcaatagtgaatactgacagagcgggagagcgtgatgctctcccgaatgctgtttttttaatcacacctttatcctttcgctgtcttgctgcaaactgattaagagagttttatcaaggagcagcacatgtggtatcaaaagacgctcacgcttagcgccaaatctcgtgggtttcatctggtaacggatgaaattctgaatcagctggctgatatgccgcgcgttaacatcggcttactgcatctgttgctgcaacatacctccgcctctctgacacttaatgagaactgcgatcccaccgtacgccacgacatggagcgttttttcctccgcaccgttcccgacaacggaaattatgagcatgactatgagggagcagacgatatgccttctcatatcaaatccagtatgctgggaacaagccttgtattgccggtgcataaagggcgtattcagaccggcacctggcaaggcatttggctgggggaacatcgcatccacggcggaagccgtcgcatcatcgcgacactacaaggggagtaaaaaatgaccattagcgagttgctacaatattgcatggcaaaaccaggcgcagaacagagcgtgcataatgactggaaagcgacgcagatcaaagtggaagatgtactgtttgcgatggtgaaagaagtagaaaatcgcccagctgttagcctgaaaaccagcccggagctggcggagctgctacgtcagcagcacagcgatgtgcgtccaagccgccatctgaataaagcgcactggagcaccgtgtatctcgacggtagcctgccagatagccaaatctattatctggtggatgcgtcttatcagcaggcggtgaatttactgccggaagaaaaacgtaaattgctggtgcaactctgaaaggaaaaggccgctcagaaagcggccttaacgattacagcatcggcttaaggaagcgtgccgtgtgacttgcttcgcactccgcgacggtttctggcgtaccggagacgaggatctcgccgccaccactgccgccttctggtcccaggtcgacaatccagtcagcggttttgatcacgtcgagattgtgctcaatcaccacaatggtgttgccctgatcgcgcagtttatgcagtacgtcgagcagttgctgaatatcggcgaagtgcagaccggtggtcggctcgtcgagaatatacagcgtctgcccggtgccgcgtttactcagttcacgcgccagcttcacgcgctgggcttcaccgccactaagggtggttgcggactgccccagtcgaatgtacgtcaggccaacgtccatcaacgtttgcagcttacgcgccagtgcaggtacggcatcaaagaactcacgcgcctcttcgatggtcatatccagcacttcgtggatggttttgcctttgtacttaatctccagcgtttcacggttatagcgtttacctttgcactggtcgcacggcacgtagatatccggcaggaagtgcatctccactttgatcacgccatcgccctgacaggcctcgcagcgtccgccacgaacgttaaagctgaaacgtcccggcgtatagccgcgcgcacgggattccggtacgcccgcaaacagttcgcgcacaggcgtaaacacgccggtataggtcgccgggttagaacgtggagtacgaccaattgggctttggtcgatatcgatcactttatcgaaatgctccagcccctgaatatcgcgatacggtgctggttcggcgatggtcgccccattcaactggcgttgggcaatcgggaacagtgtgtcgttaatcagcgtgcttttaccggaaccactaaccccggtgatgcaggtaaacagacccaccggcagcgtcagcgtcacgtccttcaggttgttgccgcgtgcgcctgtcagcttcagcactttttccggattcgccggaacgcgtttcttcggcacttcaatcttgcgtttgccgctcatgtactgcccggtcaagctctccggcaccgccataatcgcttccagcggaccttctgcgaccacttcaccgccgtgaacacctgcgcccgggccaatgtcgatcacatggtcagcggcgcgaattgcgtcttcgtcgtgctccaccacaatcacggtattaccgagatcgcgcagatggataagcgtacccaacaggcgctcgttatcacgctggtgcaggccgatagacggctcgtccagcacgtacataacgccaaccaggcccgcaccaatctggctcgccagacggatacgctgtgcttcaccgccagaaagcgtttctgcgctgcgggaaagcgtcaggtaattcaggccgacgttaacgaggaatttcagacgatcgccgatctctttaaggattttttctgcaatcttcgcccgctgacctgcgagtttgagattgttgaagaattccatcgcatgaccaatgctcatgtcggagatagcaggcagcggcgtattctcgacatacacgtggcgcgcttcccgacgcagacgcgtcccttcgcagctggcgcacggacgattactgataaacttggctaattcttcgcgtaccgcgctggattccgtctctttatagcggcgctccatattatgcagcacgccttcgaacggatgacgacgaatggaggtatcgccacgatcgttcatgtatttgaattcaatgttttctttgccagaaccgtacaacaccactttatgcacgttcgcgctcaggctgccccacggcgcttcgacgtcgaacttatagtgatctgccaggcttttcagcatctggaaataatagaagttgcggcgatcccagccacggatcgcaccaccagccaggctcagttccggattctggatcactcgatcaggatcgaaatattgctgtacgccaaggccgtcgcaggtcgggcaggcccccgccgggttgttaaagctaaacagtcgcggctccagttcacgcatactgtagccgcaaattgggcaggcgaagttggcggagaacagcagctcttccgctttcgggtcgtccatatccgccactaccgcggtaccaccggaaagctccagcgcggtttcaaaactctcggcaagacgttgggtaagatcgtcacgcaccttgaagcgatcaaccaccacttcaatggtatgtttcttttgcagttccagttttggcggatcggaaagatcgcagacttcgccatcaatacgagcacggatgtagccctggcttgccaggttctccagcgttttggtgtgttcgcctttgcgctctttaatgattggcgcgagtagcatcagacgcttgccttccggctggctcagcacgttatccaccatctggctgacggtttgcgccgccagcgggacgtcgtggtccggacagcgcggctcgccaacgcgggcgaataacaaacgcaaatagtcgtggatttcggtgattgtccccaccgtagaacgcgggttatgagacgtgcttttctgctcaatactgatggcaggagaaagcccctcaatatgatcgacgtccggcttttccatcagactcagaaactgccgcgcgtaggcggaaagggattcaacgtaacggcgctgcccttcggcatataaggtgtcgaaagcgaggctggatttgccagaaccgctaagcccggtcacgacaatgagcttgtcgcgggggataacgaggttgatgtttttgagattatgggtgcgggcgccccgaacttcgatcttatccattcacctttcccggattaaacgcttttttgcccggtggcatggtgctaccggcgatcacaaacggttaattatgacacaaattgacctgaatgaatatacagtattggaatgcattacccggagtgttgtgtaacaatgtctggccaggtttgtttcccggaaccgaggtcacaacatagtaaaagcgctattggtaatggtacaatcgcgcgtttacacttattcagaacgatttttttcaggagacacgaacatggccagcagaggcgtaaacaaggttattctcgttggtaatctgggtcaggacccggaagtacgctacatgccaaatggtggcgcagttgccaacattacgctggctacttccgaatcctggcgtgataaagcgaccggcgagatgaaagaacagactgaatggcaccgcgttgtgctgttcggcaaactggcagaagtggcgagcgaatatctgcgtaaaggttctcaggtttatatcgaaggtcagctgcgtacccgtaaatggaccgatcaatccggtcaggatcgctacaccacagaagtcgtggtgaacgttggcggcaccatgcagatgctgggtggtcgtcagggtggtggcgctccggcaggtggcaatatcggtggtggtcagccgcagggcggttggggtcagcctcagcagccgcagggtggcaatcagttcagcggcggcgcgcagtctcgcccgcagcagtccgctccggcagcgccgtctaacgagccgccgatggactttgatgatgacattccgttctgatttgtcattaaaacaataggttatattgttttaaggtggatgattaaagcatctgccagccataaaaaagaagcctccgttatggaggcttctacgtatcaggtcaaaatcattggccattgtggcggtgtctgattcatctcttctatcatcacgctctcgatgttgtgccagatagcggtgatgtccgccattgtgatgccaagcaaccccattgcgaaccaacaggcggaaacaacgcccagaccgctgctgatcaccgcaagcccgacataatcagaccgacgaaaacggatgttgagtgtgctggccagaaacatcattacggcactaagaagttgccagcgaagaagaaccacgccagtggtgagggtagccatcaaacaattcctctgaaaagagccgatgccctggacagcgcggcgttgttcacgggaggcgtggtacactctggctatcgcggggcttgcagaacacaaaaatgaaacactctgtttgtttcattaattttgtgaactatatcacaattgattgtttgttagccatattaggccgtgacttttattgctgtacagattatgtggtttttcagtggcattaagggcatatcttcccgccgcctctgcattcctgtaggaaattaattttgaatatcaatgaattattttcatccaggtgacgattagaaaggtatcaatttcaaatcaggcaaaagtgctatttataccgtaagatttatctaaagacgtcggtacccagggttttcaccttgcaatggccgggtataaacaggcaggaaattgatagcaatgagtcatcgtgcacgacaccaattactggcgttgccgggcattatctttttagttctctttcccatcattcttagcctatggattgccttcctttgggcaaaaagtgaagtgaataatcagctccgaacctttgctcaactggcactggataaatccgagctggtcattcgccaggcagatttagtgagcgatgcagctgaacgctatcaggggcaagtttgcactccagcccatcaaaagcgaatgttgaatattattcgtggctatctttatattaatgaattgatctatgcccgtgataaccattttttatgcagtagcctgatagcgcctgtaaacggctatacgattgcaccggccgattataagcgtgaacctaacgtttctatctattattaccgcgatacgccttttttctctggctataaaatgacctatatgcagcggggaaattatgtggcggttatcaaccctctcttctggagtgaagtgatgtctgatgacccgacattgcaatggggtgtgtatgatacggtgacgaaaacctttttcagcttaagcaaagaggccagcgcagcaacgttttctccgctgattcatttgaaggatttaaccgtacaaagaaatggctatttatatgcgacagtttatagcacaaaacgcccaattgcagccattgttgcgactagttatcaacgtcttataacccatttttataatcatcttatttttgcgttgcccgccggtattttggggagtcttgttctgctattactctggctacgtattcgacaaaactatttatctcccaaacgtaaattgcaacgcgccctcgaaaaacatcaactttgtctttattaccagccaataatcgatatcaaaacagaaaaatgtatcggcgctgaagcgttgttacgttggcctggtgagcaggggcaaataatgaatccggcagagtttattccgctggcagaaaaggaggggatgatagaacagataactgattatgttattgataatgtcttccgcgatctgggcgattacctggcaacacatgcagatcgctatgtttctattaacctgagcgcctccgattttcatacgagtcggttgatagcgcgaatcaatcagaaaacagagcaatacgcggtgcgtccgcagcaaattaaatttgaagtgactgagcatgcatttcttgatgttgacaaaatgacgccgattattctggctttccgccaggcaggttacgaagtggcaattgatgattttggtattggctactctaacttgcataaccttaaaagtttgaatgtcgatattttgaaaatcgacaaaagctttgttgaaacgctgaccacccacaaaaccagtcatttgattgcggaacacatcatcgagctggcgcacagcctggggttaaaaacgatcgctgaaggcgtcgaaactgaggagcaggttaactggctgcgcaaacgcggcgtgcgctattgccagggatggttctttgcgaaggcgatgccgccgcaggtgtttatgcaatggatggagcaattacccgcgcgggagttaacgcgcgggcaataaaattacaggcggtggcgataatcgctgggagtgcgatcaaactgccgacggaaaacgcgggagaaggtctgctggctgacataacccaggtccattgcgatatcaaaaatcggacgctcggtggtgcgcaactcaacggcggccagtaacaggcggcgttggcgaatgtaatcgccaagcgtctgatgcgtcaccgtgcggaacattcgttgcaagtaccacttactatagccacttttttttgcgactacatcaatgttaagcggctggtcaatatgctcgtcaatccatgcgataagatcctgaataattttctgatgggacataaatctgcctcttttcagtgttcagttcgttaattcatctgttggggagtataattcctcaagttaacttgaggtaaagcgatttatggaaaagaaattaccccgcattaaagcgctgctaacccccggcgaagtggcgaaacgcagcggtgtggcggtaagcgcgctgcatttctatgaaagtaaagggttgattaccagtatccgtaacagcggcaatcagcggcgatataaacgtgatgtgttgcgatatgttgcaattatcaaaattgctcagcgtattggcattccgctggcgaccattggtgaagcgtttggcgtgttgcccgaagggcatacgttaagtgcgaaagagtggaaacagcttagctcccaatggcgagaagagttggatcggcgcattcataccttagtggcgctgcgtgacgaactggacggatgtattggttgtggctgccttagccgcagtgattgcccgttgcgtaacccgggcgaccgcttaggagaagaaggtaccggcgcacgcttgctggaagatgaacaaaactaaagcgccacaagggcgctttagtttgttttccggtctttgtctttctctctatcccgctggtacacaggagggtttcccccgacgtcaacacacctcattcgagcacgtggtggaggttccggttggtgttgatgctttaattgtatgtcaccgacgtttcttcgccagtgtaaaagtatactttttaaccgcaatatttttgtcatctcagacgattttttatcgcaatcctgaacggtatacggctcgataacgctgcaatcttgcgcaccgacgataacgtttgcgcatcaattgcctggtttttcatcgtcaagacaataaaagagaaaaaagcagcaaacttcggttgaaaaagccgctatgatcgccggataatcgtttgctttttttaccacccgttttgtatgcgcggagctaaacgtttgcttttttgcgacgcagcaaattgtcgcaaacctggagcaggaagataacgtttcgctggcaggggattgtccgccacgcatcttgacgaaaattaaactctcaggggatgttttcttatgtctacgccaagtgcgcgtaccggcggtagtctcgacgcctggtttaaaattagtcaacgtggaagcactgtccgtcaggaagtggttgccgggttaacaacgtttctggcgatggtctacagcgtcatcgtcgttccaggtatgttgggtaaagcaggcttcccgcctgcggcagttttcgttgcaacctgtctggttgccggactcggttctatcgtgatgggtctgtgggctaatctgccgttggcgattggttgcgccatctccctgacagcgtttaccgcattcagcctggtgctggggcaacatattagcgtacctgtcgcgctgggtgccgtgttcctgatgggtgtgctgtttacggtaatttctgccacgggtatccgtagctggattttgcgcaacttgcctcacggtgtggcgcacggcacggggattggtatcggtctgttcctgctgctcattgccgctaacggtgtcggtctggtgattaaaaacccgcttgatggtctgcccgttgcgctgggtgatttcgcgaccttcccggtgattatgagtctggtaggtctggcggtgatcatcggcctggaaaaactgaaagtccctggtggcattctgctgaccattatcggtatcagtattgtcggtttgatcttcgatcctaacgtccatttctccggcgttttcgccatgcctagtttgagcgatgaaaacggcaatagtctgattggcagcctggacattatgggcgcgctgaatcctgtagtcctgccaagcgttctggcgctggtgatgacggcagtatttgatgccaccggaactatccgtgccgtcgccggccaggcgaacctgctggataaagatgggcagatcatcgacggtgggaaagcactgaccactgactccatgagcagcgttttctctggcctggtgggtgcggctccggcagcggtatacatcgagtctgcggcgggtacggcggcgggcggtaaaaccggtttgacggctatcaccgttggcgtgctgttcctcctgattctgttcctctctccgctctcttacctcgttccggggtatgcaacggctccggcgctgatgtacgttggcctgctgatgctgagcaacgtggcgaaaatcgactttgctgattttgttgatgcgatggcgggtctggttacggctgtattcatcgtgctgacctgtaacatcgtaacaggcatcatgatcggcttcgcgactctggtgattggtcgtctggtttccggcgaatggcgcaagttgaacatcggtacggtcgttatcgccgtggcgctggtgaccttctatgcgggtggctgggctatctaatctttcatcggattctgaaaacgggtggcaatggctgcccgtttttattttctccgcacattgtgtgagcttttgcgatattctgaaaaaaatgagaattcaggcataacgtctttctcagatcataaaaaacatcgcaaacagggaacgcatggaaatcttcttcaccatactgataatgaccctcgtggtcagcctgtccggggtggtcactcgtgtcatgccctttcagatcccgcttccgcttatgcaaatcgccatcggtgcgctactggcgtggccgacgtttggtttgcatgtggagtttgatcctgaactctttttagtcttgtttatcccgccgttgctgttcgctgatggctggaaaacgccgacccgtgaatttctcgaacatggtcgagagattttcggcctcgcgctggcgctggtggtggtcaccgtggtcggcattggcttccttatttactgggtggtgccgggcattccgctgatccctgcctttgcgctggcggcggtgctttctccgaccgatgctgtggcgctctccgggattgttggcgaagggcgcatcccgaaaaaaatcatgggcattttgcagggcgaagcgttgatgaatgacgcctccggtctggtgagcttgaagtttgccgtagcagtggcgatggggacgatgatcttcaccgtcggcggtgcgacggtcgaatttatgaaagtagccattggcggtattctcgccggttttgtggtgagctggctgtacggtcgcagcctgcgattcctcagccgctggggcggtgatgaacccgcgacgcagatcgtcctgctgttcctgctgccattcgcttcttatctgattgccgaacatattggcgtttccggcatcctcgctgcggttgccgccgggatgaccatcacccgctccggtgtgatgcgccgtgcgccgctggcaatgcgcctgcgtgcaaacagcacctgggcgatgctggaatttgtctttaacggcatggtgttcctgctgttaggtctgcagctgccgggtattctggagacgagcctgatggcagcagaaatcgaccctaacgtcgaaatctggatgctgtttaccaatattattctgatatatgcggcgctgatgctggtccgtttcggctggctgtggacgatgaaaaagttcagcaaccgcttcctgaagaagaagccgatggagtttggtagctggaccacacgagaaatcctgatcgcgtctttcgccggggtgcgtggggcgatcactctggccggtgtgctctctatcccgctgctcttgccggatggtaacgtcttcccggcgcgctatgagctggtgttcctggcggctggcgtcattctcttcagcctgtttgtcggcgtggtgatgttgcctattctgctacaacacattgaagtcgcggatcatagccaacaattgaaagaggaacgtattgcgcgagcggcaacggcagaagtggcgattgtggcgatccagaaaatggaggagcgtctggcggcggataccgaagagaatatcgataaccagctgcttacggaggtcagttctcgcgtcattggtaacctgcgtcgtcgcgccgatggacgtaacgacgttgaaagttccgtgcaggaagagaaccttgagcgtcgcttccgtctggcggcattgcgttctgaacgtgctgaactttaccacctgcgcgccacacgggagatcagcaacgaaacgctgcaaaaattactgcacgatctcgatttgcttgaagcgttgctaattgaggaaaatcagtaagccgaaagcgacgtaaccaggcccgaggtaatctgaaaaaggtgcaatcttttgcacctttaacaggttagctcgggctaacattcatgattctaaaacaaataaattatctctcttttaaagtcaattcattggctgttcttcgacttaacctcaatctgcatcttgcataatatctgcagtaatcttcatagcgactgcatgaagattatcctcagtttgactcatgccagtatgagtggcacaatcttcttcaaagaatttctgtagtgttaccaggatatcactattaatggagatattttcctcaccacggagaatggtaatacccattccctggacgctagcctcatcgaaattaacacgatagagacggatattaaacatccaggcttttgttaaaacagaacagttgaaatggcaattgcttaaattggcattattaaaattaacattagccatattagagtcggtacatataaccatttcgaggaacgtatttgttaaccgcgtaaaaaagagtttgctatcaattaagtttatattctggagggttgctttattcaggttgacacgagacagatcagcatgttcaaagttaattaaatcaagtttagagaagctaaggtcggctctaaataaattaatatatggcgctattactttataaagatttacctcagccatgtatgccatataaaaattactataatcaaggaaggtatttttaatattggctctattcattgttgcattgtagaattgaacatgcatagcggaacaactatttagagttccgtcagtcatttttatctgagcgaaattactgtcatcgagaatacaattatcaaaaagtattttttccattatggcgaaattaaaattcgttttatacatattacagtcctgaaaaatagcgttttgtagtctgcaacctgcaaaattgctattggataaatcttcatctttaatcacgatacctttcaggctaaggtgactaaaatcgtaaccaccatttactgtctgtgggatttcgatagtattattatggacggtgacattatttataaaatataccaccttaatactcacttccttatctttattaaggtaaactcttctcgtaattctatcgtcacatttattatttgcatgactagctatatctataaaatatttatgtattttcctgtccgtttctttcgtgatttttccacttggtaaactatcataaattcttttcattttctgaatcaagcctatcactttttcatgatcatccattttgaaaagagagagggctttattgtcaattaacgtgtttttatgatgtttgctgtaattatcactttttgttttctttgtatgacttggacttgtgacagagtggttatcgttaatcaggcaaagagggaaaaacatattatttaaaccattatagcgcataaaatatccttataattaacaagaaagaaaaggcatattctctgcattatcattttctacgactgtcaaaaatcgctcattttttaatgagtttatttgtttaatattatgggaaaaggtgatgcatttgggagaggaagagtattccccggtcagacgaccggggaaggggagagattaatgcgcgcggccttgctcaacgccaaagccggtctgggagcggataaactgcgcgcggaacagttcacgctcacgcgcgccttccgcactgttatcggttgcgctgaagaaccagatgccgaggaatgccacggtgatagagaacagcgccgggtattcatacgggaagatggctttttcgtgaccaaggatctgtacccaaatcgtcgggccgaggatcatcagtactactgcggtaatcagccccagccagccacccatcatcgcgccacgcgtggtcagtttgctccagtacatagaaagcagaatgatcgggaagttacagctcgccgcgatggcaaacgccagccccaccataaaggcgatgttctgattctcaaacagcacgccgaggataatcgcaatcacgccgaggatcagtacggtgattttacttacccgcagctcttcacgttcggtcgcgccttttttgaagacgttagcgtacaagtcatggctaaccgcggatgcgcccgccagcgtcagacccgcaaccaccgcgaggatagtggcgaaagcaaccgcactaataaaaccgaggaacaggttgccgcccactgcattcgccaggtgaacggccgccatgttgttaccaccaatcagatggcccgccgcgtctttatattccggattcgcaccaaccagcatgatcgcgccgaagccgataataaaggtcagaatatagaagtagcccataaacccggtggcgtagaacacgctcttacgtgcttcgcgggcatcgctgactgtaaagaagcgcatcagaatgtgcggcaagcccgccgtaccaaacatcagtcccagacccagagagagcgcggagatcggatctttcaccagcccgcccggcttcatgatgtcgacacctttcgggtgtaccgccatcgcttcactgaacagattgttgaagctaaagccgacgtgtttcatcaccataaaggccataaagctggcaccgaacagcaacagcacggctttgataatttgcacccaggtggtcgccagcatgccgccgaacaggacgtacatcatcatcagcacgccgaccagcaccaccgcaatgtgatagttaaggccaaacagcagctcgatcagtttacctgcgcccaccatctgggcgataaggtaaagcgccaccaccaccagagaaccacaggcgctaagaatacgaatcggcccttgtttcagacggtaagaggccacatcggcaaaggtgtagcgccccaggttacgcagacgttcggcaatcaggaacaaaatgatcggccagcccaccaggaagcccaggctgtaaattaagccgtcatagccggaggtaaacaccagcgcggagatccccaagaaactggcggcggacatatagtccccggcaatcgccagcccgttctggaagccagtgatattgccgcctgcggtgtagtagtcgctacgagaacgtacgcgtttacttgcccagtaggtaatgccgagcgtaaacacgacgaaaatcaggaacataataatcgcctgccagttcgttggctggcgctctacggccccgctaatagcatccgcggcgttagctgcgaaagggagtgtggcggcaagcgccgtcagaactcttttcatgatgcttgtacctcatgcagttatttcaacttgcttgtacctcatgcaggacttcattattaagacggtcgaattcgccgttcgcccgccagatgtagataccggtgagaacaaaggagatcacaatcactccaacaccaattggaataccgcgtgtgacgctggtgttcggattcagcggcgtgcccagccagccgggcgcgaaggcgatcagtaaaataaagccgatataaactgccagcataataatgctcaggatggtggcaaaccgttgccgtttttcgactaactccctgaaatgcgcattgtcttctatccgctgataaatagtgccattcatcacagattctccagaggtaatgtagggattgttttaattcccgctcccttatgggagaaggttaacgctcgggtaacccttgccgaatgtaggccggataaggcgtttacgccgcatccggcaatcaatgcctgatgcgacgctgtcgcgtcttatcaggcctacaaaccgttaccgactcgcatcgggcaattgtgggttagcttggcatcgcgatagcctgcttctcttcaagcagcttctcgactacgccaggatcggcaagcgtgctggtatcgcccaggttgctggtatcgcccgccgcaattttgcgcagaatacggcgcataattttgccggagcgggttttaggcagggagtcggtccagtgcagcacgtctggcgtcgccagcgggccaatctctttacgcacccagttgcggacttctgcgtacagttctggactcggttcctccccgtgattaagcgtgacgtaggcgtagatcgcctgacctttaatattgtgcggaatacctactacggcggcttcggcaatcttcggatgcgccaccagcgcgctctcaatctctgccgtccccagacggtgaccggagacgttcagcacgtcgtccacacgcccggttatccagtaatagccatcttcatcgcgacgcgcgccgtcgccgctgaaatacatatttttgaaggtggagaagtaggtctgttcaaaacgttcgtgatcgccaaacagcgtacgcgcctgacccggccaggagtcggtgattaccaggctaccttcggtggccccctccagcgggttaccttcgttatcgaccagcgccggttgcacgccgaagaacggacgtgttgcgctaccggctttcagctcggtagcgccaggcagcggggtgatcatgaaaccgccggtttcggtctgccaccaggtatcgaccaccggacatttctcgttgccgatttttttccagtaccactcccacgcttccgggttaattggctcgcccacggaaccgagaatgcgcaggctgctacggtcggtgccttcgatcgctttatcgccttccgccatcagcgcgcggatcgccgtgggtgcggtatagagaatattgacctgatgcttgtccaccacctgcgccatacgggcaggcgtcggccagttgggtacgccttcaaacatcagcgtggtcgcaccgcaggccagcgggccgtacagcaagtaactgtgtccggtcacccagcccacatcggcggtgcaccagtagatatcacccggatgataatcaaagacatatttaaaggtcagcgccgcgtacaccagataaccgccggtagtatgcagcacaccttttggcttaccggtagaaccggaggtgtagagaataaacagcggatcttcggcgttcatctcttccgcctggtgctgatcgctcgcttgctcaaccaggtcgtgccaccacaggtcgcgcccttcctgccagtcaattttcccgccagtacgcttcagtaccaccacatgctctacgctggtgacgttcgggtttttcagcgcgtcatcaacgtttttcttcagcggaatactgcgcccggcacgcacaccttcgtcggaagtgatcaccagtcgactgttggaatcaataatgcgcccggcaacggcttccgggctgaagccgccgaaaatcacgctatgcaccgcgccaatgcgggcgcaggccagcatcgcaaccgcggcttccggcaccatcggcatataaatcgccaccacatcaccttttttaatgcccagctcgagcagggtattggcgaagcggcagacgtcgcggtgcagctctttatagctgatatgtttgctctggctggcgtcgtcgccttcccagatgatggcggtacgatcgccgttttcttgcagatggcggtcaaggcagtttgccgccagattcagcgtgccgtcctcgtaccatttaatggacacattaccgggggcaaaggaggtgtttttcaccttctggtaaggtttgatccagtcaagaatttttccctgttcgccccagaaggtatcaggtacgttaatagattgttgatacatcgcctcgtactgctgagggtttatcaggcaacggtctgcgatgttggcaggaatggtgtgtttgtgaatttggctcatgcttttgttctccttgtaggatgttaataatatgtggcataagcgttaaatgtaggggtattggcagttttgtttagtatttgggcgacagatcacgcaaaagtagaattgtgcaaataaacggcagggtaatttttgaaggtcagcaacaaaagttgattaattctttgaggaacatgcagttatgcatgctgttgaaaaagaggaagatactgactaactctaaagtggtattttacatgcacttacaattgattaaagacaacattcacagtgtggttatttgttacacataggggcgagcaatgtcatgacagtgtaggtgcggttactgtcgtgaaaaacaataaaaaccgccattgcaacaatggcgcaattcggatgaagcccctatgacaaggataaaaataaacgcacgccgtatcttcagcttattgattccttttttctttttcacttctgttcacgctgaacaaacggctgctcccgcaaaacctgtaactgtggaagcgaagaatgaaacctttgccccgcagcatcccgatcaatatctctcctggaaagccaccagcgaacagagtgagcgtgttgacgccctggcggaagatccacggctggtgatcctgtgggcggggtatcccttcagccgcgattacaacaagccgcgtggacatgcttttgctgtgaccgatgtgcgtgaaaccctgcgtaccggtgcgccgaaaaacgctgaagatggtccgctaccgatggcatgctggagttgtaaaagcccggatgtggcgcgtctgatccagaaagacggcgaagatggctacttccacggtaaatgggcgcgcggcggtccggaaatcgtcaacaacttaggttgtgccgattgccataacaccgcctctccagagttcgccaaaggcaaaccgaagttaaccctttcccgtccgtatgcggctcgcgcgatggaagccattggtaaaccttttgagaaagccggacgtttcgaccagcaaagcatggtttgcggtcagtgccatgtggagtattacttcgacggcaaaaacaaagcggttaaattcccgtgggatgacggcatgaaagtcgaaaatatggagcagtattacgacaaaattgccttctctgactggactaactccctgagcaaaacgccaatgctgaaagcgcagcacccggaatatgaaacctggacagcgggcattcacggtaaaaacaacgtgacctgtatcgactgccatatgccaaaagtgcagaacgccgaaggcaaactctacaccgaccataaaattggtaatccgtttgataacttcgcccagacttgtgcgaactgccatacccaggacaaagctgccttgcaaaaagtggtcgcggaacgtaagcagagcattaacgacctgaaaatcaaggttgaagatcaactggttcacgctcacttcgaagcgaaagcagcgctggatgcaggcgcgacggaagctgaaatgaagccaattcaggacgatatccgtcatgcccagtggcgctgggatctggcgatcgcttcccacggcattcatatgcacgcaccggaagaaggtttacggatgctcggtacggcgatggataaagcggcggatgcacgcaccaaactggcgcgcctgctggcgaccaaaggcatcacccatgaaatccagatcccggatatcagtaccaaagagaaagcccagcaggccattggcctgaacatggaacaaatcaaggccgagaagcaggacttcatcaaaacggtgatcccgcagtgggaagaacaggcacgtaaaaacggtctgttaagccaataaccccgttccgcctcgcaaggggcggaaaacacaatggagtgaatatgagcgtattacgtagcttattaactgccggggtgctggcgagcggcctgttgtggagcctgaacggaattaccgctacccctgcggcgcaggcatctgatgatcgctacgaagttacccagcagcgtaacccggatgccgcctgtctggactgtcataaaccagataccgaaggtatgcatggaaaacatgcttccgttatcaacccgaataacaaactgccggtcacctgcaccaactgtcacggccagccaagtccgcaacaccgcgaaggggtgaaagatgtgatgcgctttaacgagccgatgtacaaggttggagagcagaacagcgtctgtatgtcctgtcatctgccggaacagttgcaaaaagcgttctggccgcacgatgtccacgtaaccaaagtggcgtgcgccagctgccattccctgcatccacagcaagatacgatgcagacgttaagtgacaaaggacggattaagatttgcgtcgattaccacagcgatcagcgcaccaatccgaactttaacccggcgtctgttccgttgcttaaggagcagccatgacctggtctcgtcgccagtttctcaccggcgtcggcgtgctggcagccgtcagcggcaccgcagggcgcgtggtggcgaaaacgttgaatatcaatggggtgcgttacggcatggtgcatgacgagagcttatgcatcggctgtaccgcctgtatggatgcttgtcgggaagtgaacaaggtgccggaaggcgtcagccgcctgacgattattcgtagcgagccgcagggcgaatttcctgatgtgaaatatcgcttcttccgtaagtcttgccagcactgcgatcatgcgccgtgcgttgacgtctgcccgaccggtgcgtcttttcgcgatgctgccagtgggattgtcgatgttaatccggatctctgcgtcggttgtcagtactgcatcgccgcctgtccgtaccgcgtgcgctttatccatccggtcacgaagacggcggacaaatgcgatttctgccgtaagaccaatttgcaggccggtaagttgcccgcgtgcgttgaagcttgcccgaccaaggcgctgacgtttggcaatctggacgatcccaacagtgagattagccaactgctgcgccagaagcccacttaccgctacaagctggcgctgggaaccaaaccgaagctgtaccgcgtaccgtttaaatacggggaggtgagccaatgacgcagacttccgcatttcattttgaaagcctggtgtgggactggccgattgccatctacctgtttttgattggtatttctgctggtctggtgacgctggccgtgctgttacgtcgcttctacccgcaggcgggcggtgcagacagtacgttgctgcgcaccacgctgattgtcgggccgggcgcggtgatcctcggtctgttgatcctcgtcttccacctgacaagaccgtggaccttctggaagctgatgttccactacagttttaccagcgtgatgagcatgggggtgatgctgtttcagctctacatggtggtgctggtgctgtggctggcgaaaatctttgaacatgatttgcttgccctgcaacaacgctggttgccgaagctggggatcgtgcaaaaggttctgagcctgctgacgcccgttcatcgcggactggaaacattgatgctggtgctggcggtgttgttgggggcttataccggctttctgctgagcgcgctgaaaagctatccgttcctcaataacccgatcctgccggtgctgttcctcttctccggcatcagctccggtgcggcggtggcgctgatcgccatggcgatacgccaacgcagtaacccgcattccacggaagcgcagtttgtacaccgtatggaaatccctgtggtatggggtgaaatcttcctgctggtggcgttttttgtcggtctggcgctgggcgatgacggtaaagttcgtgcgctggtggcggcattaggtggcggtttctggacgtggtggttctggcttggtgtcgccgggctggggctgattgtgccaatgctgctcaaaccgtgggtcaatcgcagttccggcattcctgccgtgctggcggcgtgtggggccagtctggtcggcgtgttgatgctgcgctttttcattctctacgccggacagttgacggtggcgtaagccagaaaagaggtggtttctggacgtattccttcctgaagtcggttttctggcgttgttgttaagtctcggggtcaacgtgttgaccccgttgacggccttcgcgggagtgcggttgcgctggcctgccatgatgcgactcacttgcatcggcattctggcgcagttcgcgctcctgctgctcgcctttggcgtactgacgtattgttttctcatcagcgatttcagcgtcatttatgtcgcgcaacatagctatagcctgctgagctgggaactcaagctggcagcggtgtggggcggccatgaaggtagcctgctgctttgggtgctgctgctttccgcctggagcgcgctgtttgcctggcattatcggcagcaaaccgatccgctatttccgctgacgttagccgttttatctctcatgctcgccgcactgctactgtttgtggtgctgtggtccgatcccttcgtgcggatatttccaccagcaatcgaaggccgcgatctcaatccgatgctgcaacatcccggtcttatctttcatccaccgctgctttaccttggctatggcggtttgatggtagcggcgagcgtggcgctggcgagtctactgcgcggcgagtttgatggtgcctgcgcccgaatttgctggcgctgggcgttacctggctggagtgcattaacggcggggatcatcctcggttcctggtgggcctactgcgaactcggctggggcggctggtggttctgggatccggtggaaaacgcctctttattaccctggctttctgccactgcgctgctgcacagtttgtccctgacacgccagcgggggattttttgccactggagcctgttgctggcgatagttactctgatgctgagcctgctgggcaccttaattgtccgttctggcattctggttagcgttcatgcgttcgcgctggataacgtccgcgccgtgccgttgttcagcctgtttgcactgattagccttgcgtctctggctctgtatggctggcgagcgcgggacggtggcccggcggtgcattttagcgggttaagccgggaaatgttaatcctcgctacgctgttgctgttttgcgcagtgctactgatcgtgctggtgggaacgctttatccgatgatttacggcctgctgggctggggacgcctctccgttggcgcgccgtattttaaccgcgcgacgttaccgtttggtctgttgatgctggtggtgattgtgctggcgacgtttgtctctggcaaacgcgtgcagcttccggcgctggtagctcatgcgggcgtgctgttatttgccgctggggtcgtggtctccagcgtcagccgtcaggagatcagcctgaatttacagccgggtcagcaggtgacgctggcaggatacaccttccgttttgagtgcctcgatctacaagccaaaggcaattacaccagcgaaaaagcgatagtggcactgtttgaccatcagcaacgcattggtgaactgacgccggagcggcgtttttatgaagcacgccgtcaacaaatgatggaaccgagtattcgctggaacggcatccatgactggtatgcggtcatgggggagaaaactgggccggatcgttacgcttttcgtttgtatgtacaaagcggtgtgcgctggatctgggggggaggattgttgatgattgcgggcgcattgttaagcggatggcgggggaagaagcgcgatgaataaagggcttctcacgctactgctgttatttacctgttttgcgcacgctcaggtcgtagacacctggcaattcgccaatccgcaacaacagcaacaggcgttaaatattgccagccagttacgttgtccgcagtgccagaatcaaaacttactggaatccaacgcgccggtggctgtcagtatgcgccatcaggtttacagcatggtggcggaggggaagaacgaagtcgaaatcattggctggatgaccgaacgctacggagattttgttcgctataacccaccgttaacgggtcagacgctggtgttatgggcgctgccagtggtgttgttactgctgatggcactgatcctctggcgagtgagggcgaagcgatgaaacagcccaaaataccggtgaaaatgctgacaacactcacgatattgatggtatttctctgtgtcggcagttatctgttaagcccaaaatggcaggcggtacgtgcggagtatcagcgtcagcgcgatccgctacatcagtttgccagccagcaaaccccggaagcgcagcttcaggcattgcaggataaaatccgcgctaatccacaaaacagcgaacagtgggcgttactgggcgagtactatctgtggcaaaacgattacagcaatagcttgctggcgtaccgtcaggcgttgcaactacgtggtgagaacgctgaactgtatgcggcgctggcgacggtgctttattaccaggccagccagcatatgaccgcccagactcgcgcaatgatcgacaaggccctcgcgctggacagtaatgaaatcaccgccctgatgctgctggcttccgatgcgtttatgcaggcgaactacgcgcaagccatcgaactatggcaaaaagtgatggatctcaacagtccgcgagttaaccgaacacagctggttgagagcattaatatggcgaaattgttgcagcggagattggattaatcatctggtgatgaagattatgtcattgagctgcataaaaaataatcgaatgaacatatgccaaaaataatcactaatcagtattattgcagattaaacaaataaaaatctttccataacaaatggttattcattaatcctgccataaactcgcgttattatgcattaatgcagcgaaaagctctgttgttaaagggttgcgcaacataccgcgcaaatgatactgatcataagcgttaaaaaaatctacaaaccaacgcaacacaattcatgccccggcagtatgtcacgttctcgcgtttctgaacggggaacggcgctccattgaggaagtcattcatatgaaaaatataaaattcagcctggcctggcagattctgtttgctatggtgctgggcattctcctgggaagctacctgcactaccatagcgacagccgcgactggctggtcgtcaatttgctctctccggcgggtgatatcttcatccatctgattaaaatgattgttgtgccgattgtgatctccacgctggtggtgggtatcgcgggtgttggtgatgccaaacagctcgggcgtattggcgcgaaaaccattatctacttcgaggtgatcaccaccgtcgccatcattttggggatcactctggcgaacgtcttccagcccggtgccggggtggatatgagccagttggcgaccgtcgatatcagcaaatatcagagcactacggaagcggtacaaagcagttcccacggcattatgggcacgattttgagcctggtgccgacgaacattgtggcgagcatggcgaaaggcgaaatgctgccgatcatctttttcagcgtgctgtttggtctggggctttcttccctgcccgcgacgcatcgtgaaccgctggtgaccgtgttccgctccatctctgaaaccatgtttaaagtgactcacatggtgatgcgttatgcaccggtgggtgtgtttgcgctgattgcggtgacggtggctaactttggtttcagctctctgtggccactggcgaaactggtgctgctggtgcatttcgccattctgttcttcgcgctggtagtgctgggaattgtggcgcgcctgtgcgggttaagcgtctggatcctgattcgtattctgaaagatgagctgattctggcgtactccactgccagctctgaaagcgtgctgccgcgaattattgagaagatggaagcctacggagcaccggtgagcatcaccagtttcgtggtgccgaccggttactcttttaaccttgatggtagcacgctgtatcaaagtattgccgctatcttcatcgcgcagttgtatggcattgacctgtccatctggcaggaaatcattctggtgctgacgctgatggtgaccagcaaagggattgctggcgtgcctggcgtgagctttgtggtgttgctggcaacgctgggtagcgtaggtattccgctggaaggtctggcgtttattgctggtgttgaccgtatcctcgacatggcgcgtactgcgctgaacgtggtgggtaatgcgctggcggtgctggtgattgccaagtgggaacacaaatttgaccgtaagaaagcgctggcttatgagcgtgaagtgctgggcaaatttgataaaactgcggatcaataattgaagattgccggggatatccacccggcaatgtgtgaatgcctgatgcgacgcttgccgcgtcttatcaggcctacgccagacagcgcaatagcctgatttagcgtgattttgtaggtcggataaggcgtttatgccgcatccgacatcaacgcctgatgcgacgcttaacgcgtcttatcaggcctacgccagacagcgcaatagcctgatttagcgtgattttgtaggtcggataaggcgtttacgccgcatccgacatcaacgcctgatgcgacgcttgccgcgtcttatcaggcctacgccagacagcgcaatagcctgatttagcgtgattttgtaggtcggataaggcgtttatgccgcatccgacatcaacgcctgatgcgacgcttaacgcgtcttatcaggcctacgccagacagcgcaatagcctgatttagcgtgattttgtaggtcggataaggcgtttacgccgcatccgacatcaatgcctgatgcgacgcttgccgcgtcttatcaggcctatcttaaccgttggttaatttttcaaactcttcacacccggtatcaaacccttccatacagctcaggttcaaccagtgcagcgccttttgcttgttcttctcgataaaaccttcttcaccgtttaagaacatcattcccgcccagtactcggaataaccggttcgggaaattgcagagctgcgtttgaaataccaggttgccttgtcatcgtcggccttaatgcccacgccgttggcgtaaatcaaaccaagcagcatttgggcatcgacggcagagtcgttctccagatcttcgctggcgttttctaacaggctaattgcctttggataatccggtttacccgcttgagtatttaccagaatatgcgccagcgttacttcaccttctttactgcccgcttgcgccgctttctctgcaagaacttttgcttgtggatagtccagactgaccggattggtgattttgatctgcgccagcagcgcgcaggcatcagcatcaccgctgtcggcggctttctgtgcccaatattcggctttgctcaaatcgccggagctaaaccagctgtcggcaagaaaatattgtgcgcgtcggtccccggcctctgctgcctttaaatactggctgccaggctcggagtcgttggcgtgggcaaagaatgtcaaaaacaacatcaatgcgataatttttttcattttgataatacgattgggtagggagtaaccagtataaagagttcgaatggataaaaaaacagcctccgaaaggaggctgtagaaaggacggtattacgccagtgccgcttcgcgcaggcgagttttcaacttgttgtactcgtcaatcacgtactgctcggcggcgcgctgatcggcgatcggctcgacgcgaacggcgcagtatttgtactccggcgttttcgtaatcgggcttaagttttcggtaaccagctcgttacaggcaccaatccaccactggtaggtcatgtaaatcgcccctttgttcggacgatcgctgacctgcgcacgggtgataattttgcctttacggctgtgcacccaaaccaatgcctcatcttcaatacccagacgtttggcgtcttcggtattgatttgtgcgtagccaggttcatcagccagcgccgccagtgccgcacagttaccggtcatgctacggcaagagtagtgaccaacttcacgcaccgtactcagtaccatcgggtactcgtcggtgagtttgtcgattggcgctacccagtcgcaggtgaagaactgcgccagaccgttcggggtatcaaacttctctttaaacagataagaagtcccctgatcggcatcactagtatcgcggcaaggccactgaatgaagcccagttcgcccattttctcgtaagtcgcaccgtagaaatccgggcacagatgacgcaactcatcccagatctcctgggtgttgttgtagtgcatcggataacccatacgggtggcgatttcactgatgatttgccagtccgttttcagatcccatttcggttcaaccgccttgaagaaacgctggaagccacggtcagccgcagtaaacacgccttcatgctcgccccagctcgtactcggtaaaataacatccgccgcgctcgcggttttggtcataaagatgtcctgaacgataaccagttccagatcttcaaaggctttacgtactgcgctcagctccgcgtcagtttgtagcggatcttcgcccataatgtacgcggcacgcacttcgccatgcgctgcgcggtgcggcagctcgctgatgcgatagccggtatgcgctggcaggctttccacgccccaggctttggcgaatttctcgcggttagccggatctttcacgtactggtatcccggatacgtatccggcagcgcgcccatatcgcaggcaccctgaacgttgttctgaccacgaaccgggttaacacccgcatgcggcttaccgaggttaccggtcagcatcgcgaggctggtcagagaacgcacggtttccacgccctggtagaactgggttacacccatgccccacaggatggcggcgcttttcgcctgggcatacatccgtgccgcctgacgaatctcactggcgctgacgccggtgatatcttcaacgctctccggcgtgtagccttcaacgattttacgatactcttcaaagccttctgtacgactagcgacgaacgctttgtcgtacagattttcttcaataatgacatggcccatcgcattcaacagcgcgatgttgctgccgtttttcagtgcaatgtgcatgtcagcaatgcgcgcggtttcaattttgcgcggatcgcagacgataattttcgccccgttacgtttagcgttaattacgtgattcgccacgattgggtgggaatccgccgggttgtacccgaaaacgaacactaaatcggtattatcaatttcgttaatagcattgctcattgcgccattaccgacgctttggtgcagacctgcaacgcttgggccgtgtcagacacgagcgcagcagtcaacgttattggtaccaataacggcgcgcgcaaatttttgcattacatagttggtttcgttacccgtaccacggctggagccggtcgtctggatggcatccggaccgtacttctctttgatggcgctcaggcgctcggcaacgtaattcagtgcctcatcccaggaaacaggttcgagtttgccgccacgctggcgacggatcatgggggttttcaggcgcggggtcaggatctgggtatcgttaatgaagtcccagccataataacccttcagacacagggtaccctggttggttttcccctgcgctgcctccgcccggacgattttgccgttatcgacgaccaggttgattttgcaaccacttgcgcaataggggcaaaccgtgacgacttttttcatcggtctcgctccagttaatcaaatcacgcatacgcgctctcgactacagtatgcatcttttatgccacattttatgtggggtcattccctgatattacgggcactatttattcaaaactctgacgaaaaacaggctgtcgtcagttttgacgtgacgaaacgaaataccgcgtgacagccatcacgcggcagacattttattttttctcgacgacgggacctgcctgatacccgccgcccaggcttttcatcaactgaatgctttggatcacccggcggctgtccagcatcagtaaactcatctcttcggcaagcactggcaaccgggcttcggtggcctgtaagcggctggttaagccgcgctgataggcggcctcggcagcgcgctgggtaaagcgcgtggcttccacgcgttcagcctgcatttctcgctcgtcgttgagcgtttgcagacgcgtgccgttgacggcaacgtcacgcaccgcgttcagtacactctggttgtaacgttcaatcatcatgttgctggcggcgcgcgtgccttcgagattggcattcaaccgtccaccgtcaaacagcggcaatttcagacccgggatgaagttgaactggcgactggtttttttgaataaggtatgcagatggatggagtccagaccgaaaaacgctttgatatcaaagctcggatagaacaacgcccgcgcggaatccacctgatctaaactcgcctgaacataccagcgcatggcttgcagatccgggcgtctggcgagcaactcataagagagtgtcgccggaatgccggtctggacttgcggtaatgccaccggtctgatctccggcatatcgctggctcccgcgccaatcaatgcacgcagagattctcgcgtttcggtgatttgccctttgacggcaacaatttgtttatcgaccgccagaatctgtgcccgcgcgccgtggaaaggcacttgcgcttccagaccgtgcgccactttactctggtgcgctttcaccgcgtaatcaatcacatcgtgagtttgttctaacagatcgagcatctgatagctggcctgcatactgtaataaagctgcgctacgcccgtggccaggcttagctctactgctgcggtttctgccagcgcggcattatgcgcgccaatggcggcggcaaccgcactgcgatgcacaccccacaaatcaagatccagtccggcaaacaaacctactgtggcttccgtatagtacggcccgtccatacccagtgctggcgcatccatactataagggcttaaaaagccgttcgcgctgacacgttggcggttgagcatccctaacgctgcgacctgtaattgactaccggcatctaacaaatcggcctgggactgcgctttttcttcccgcagtttcgcttcggcgagggtgtgactaccacttagcgtccgttggatcagcgcatccagctgcgggtcattgagttgtttccaccactgcgcctgcggccagccggagctggcaagatgaatatcgtcggccagtttgatttgttccggtttgagctgttgatgaggtgcagaatccttacgtaccagggcacagccggaaatcagcgtcgtgctgccgagaatgctgcacaacagcagacgactaagttgacgattgatcattgcgtggctccttgtgcctgttccgtggcgggcgttaatgccggggctgtccagtctggcaagcgggcgaaaagctggcagacgtgttgctcctgttttaataaggtgggcaggatggcctgagaggcgggtgtctcttcaagcgttatttgaggagaacggctgagtgcggttgccagaccggcagcgtatttctccagggcgtcggcaaactgacctgctctgtccggctgtagtgcgttatccagcgcctgcgcgctgttccaggtggcatcccaggcgtgaagaagatcgcggccctgacgaataaccgtttggctacgttcaatcagtaatgcgcgttcttcgctgtccagttgacgctccagcgccacgcgttggcacatctcttcacaggcattaaacgccgcatgcagaccgatacgaatttgcagataagtgcgcagagccgtgacttcctgctggcgtgggatccgcattactttacttaacatacccagcgtgccagccagtttttgcggcagtgtgcgcgcttcactttcaggccagacaaaggtgtaaatcaccgcggacaccacggtaccaatgatgatacccagggcgcgatcgcgaatttccaccaggtcgtacactgggccaaaaacgttttcgagcgtggcgagcgcgaaggtgaccaccatctgtgtgccgatataagaagagcgttcagagctggtggcaatccatgcgcccaacaggaaaatcggtgccagcacaaacagcaattcgacaatattgtccagccagggcatgaccagtagcgtgaataacagcgccagaatcgcgccgcaaaaggccccgccaaaacgcagcaccatcttctggtagctgctaccgacatttgggttagcgacgatcacgcatgtcagcatacaggtgtgaatgccttcccagtccacgccgctgtaaaaggtgtaacagatcaaacaggcgagcagcgtttttaccgcgtagcgcatatagtctggattggtaaaagcatcggcggccatacttggcggtttggctgcgggcgttggcggcgtattcgggtccatctgacccagttgtaacaacgtctggcagatattctccaggttacattcccgtgccgccatcgcttcactttcactgatccgccagtcgctttgccagcactgaccttcagcaacggcatgctgcagcttgttgatttcactagctaatttttgtcggaattcaataattgcctgagaatcagcaaaagaggtgggatcgtagcgattcagcgtgctgtaaatgtaggttaccgttgccacgcagctttgccaccatgcgttttgagttcgccagttggcatcgtccgcgaggcaaaagacattgagtttttgtagcgccagcgcctctctttcaatccgcgtttcgggtagcggtgcgaggctgtctgtcaggtgactaatggcatcatcaagccgatcattaagcgcctgatgcatttggctaatggcacgactgggaaaccacagcacgccgattaacgtcatcagcaaggttggatagaggccaacaacgatacaccacagcgttaagcgcacgaccacttccggatagtcgagcatggcggggaaggtttgcccgtaaatagcgacaatggcgacggcgaaaaagaccagccccaagcgatgggtgcgcatcaaaaacatgcagcccatcaggatcggtccggcgatgatcaatcggatcaacggttcgccgtaactccatttgtagatcaaaaacaggctgccgatctccagcaccgtggcaaccacaaacaagatcgcgacaaatttggtgtaaaacgcgttgctctgaataccgtaaaacagcactgccaggcttaacgccacaaaagggatctcaaaggtcatgctgatcagaatcaccagcaggcagcctacccagagttgcacggtctgcggcacgcgacctggtcgccgctcgcttaactcttcatgaaagaacgccagcagcctgaccaccggtaatggcagggagttgagcgcgctcattattgcggctcaagattagcgactgcgctagcgccgatgcggaacatttccgggtcaggtttatcgaccatgattttgaccggaaaacgctgggcaacgcggacccagttaatagaacgagacactttcggcaggccgcccagcaccaggccgccgtcatccggtagcacgccgtagccaatgctatccactttaccctcgaaggttttgccgctgtcactcatcaggcgaatcgttgcgggtgtaccactgcgaatatttttcagatcggtttcgcggaagttggcgatcacataccagtgacgagtgtcgattagggtaaaaatagggcgcatggcagaagcaaattgcccgacggaggttttgagggaaatgacccggccatcaaacggcgcgcgaacggtcgccatttccagatgcagtttggtcagggcaatatccgcttcgaccgccgcacgctgggcaactaatgcatccacgccgctgacggcgctggcggcactctgcgcctgtaacaatacggcattaagatccgcttctgcggcgcgctgcgccgttcttgcacggtcaacatcttccgcactgacaaaaccttctttcagtaatggctcggtgcggcgtaatgtatctgtggcctgtttcgcggcggcacgggctttttctatcgtggcattaacgctgtcggcaccaaactgttgcgcgtcaacgctacgctgggtgagcataatttgcttatccagcgccgcgagggaggcttcagctttcgccagattggcttcgtacgggcgcgggtcgatgcggaacagcaaatcgccctgtttgactgcctggttgtcggtgaccgccagttctacaatgcggccgctgacttccggtaccacatcaatggtatctgcactcgcgtaagcgtcattagtacttggcgcactgtctacgcgccagataacgaaaacaagggcaaccagcgccaacgcaaccactaacagagcagggaatttactgcgaggagcttttttcggcgtactttccatgagcgcgtctcaaatagattagaaaaatgccagccagaacagcatggcgtagagagcaaaaagggcggtataaataattccgacaaatgccagattgatatttgcccgctgaataactcgcctcgtgatgagcgtcaaaataaggctggcaatggcgcagaaaaaccagctgggataataagcgccgatcaccgggattgccggagataatgagcatcccgaaaccatgaagacgggaattatccaggctgtttttttgagttgcatcgccatgcgagagagaactgttggcatattaaatacatcctgtctgctgcgaacaatatctgtagtgaatatcaatatccattgaaggcgtcagtatggctattttcttgatgaataaaaatagctttattcagccaccgcattcataacttatatattttatttattaattggctgtatatatttttaaaataaatacttttgggggcttcagcgcccccaaaagcgagtgacattaatttggggttacgatattcacccacaaatcgaaattatccagacaggcgataatttcttccagtttcgcgccattgccaataattttggctttcttcgcttttaccagatccgccattttggcttgtccggtcagcacggcgtgcagatcttcacggctgatgtagaaagaggcgtcggcttgcggttgcagcgttttccggtagttaagcacgctatcgttcagcgtcaggttgaggttatcgccgttgctcatattgaagttcaggctgatatttttacccgcagctttcgcgctatcgaggcgaacggccataaagtcgaacagcatttcgacgctcatcccgcgaatggtgtccggggaaccggtggtgccgtggctgaacttatgcaccccttcgcgcagctctttcgcgccggtcaggtagaaaccgcgccatgtggcggactcggcctgatagcccagctgttcaaagttattcgcttgcagattcttcgcgacctggtcacccgggttggcggcaatcacctgtttcagcagttctgcgctccagcggtaatcaccttgcttgttcgcttcttgcgccaggttgatgacacgggcagaaccgcccagcgcctgcacgtaacgtttacccatctccacctgaccatacggatgcaggttagccgggttaccgtcgtaatagccaagatagaagttatacaccgcgcgggcgttgtggctgacagaaccgtaatagccgcggctggcccagttattggcaagtgcaggcggcagcttaatcatgtcgccgatttcattcatggtgtagccctggttcgccaggtgcagggtctggtcgtgaatgtacttgatggtatcgcggtatttaccaatataatcattgatatgcttattgccccagaccggccaggtgtgcggcataaacagcacttccgcgtcgttaccccacatatccagcgtttcgttcagatactcggtccacttgctggtgtcgcgggttttcgcgccgcgcagagtgtagaagttgtgcagggtatgcgtggcgttctcggcggtacacagggctttcagggccggaatatagaagtgcatttcggctggcgcttcgctacctggggtcatcaggaagtcaaactccaggccgtcgataatcatcttctcgccagttctgacgatagttttcgtcggtgcaataatgctcgggtcgcccgttgccagcgtcacgccaaggccattacccacattgccttgcgcgttgtgcggcagtaacagaccgtaagagtagagcgcacggcggctcatgatgttacccgccagcacgttttcgctgatggcttcgtccataaagcctgcaggggcaatcacctgaactttgccggatttaacatcggcttcagagataatgcctttcacgccaccatagtggtcggtgtggctgtgagtgtagataacggcaacaatcggtttttgcggacgatgctggaagtaaaggtcaagtgcggcttttgcggcaggcggcgtcaccagcgggtcgataacaataatgcctttctcgccctcaacgaacgtaatgttagagatatcctggccgcgcacctgatacattttatcggtgactttgaacaggccagaaataccgttgatttggctctgacgccacaggctggggtttacggtttccggcgctgcggcattaatatcaaatttgtaatcgtccgcgcggtagtaaactttaccgttcgcatcacgcagaataccttcatccagcagcggggcgataaatccacgctgggcatcgtcaaaatcctgacgatcgctaaacggtaaacttttggcgtaattctgattaacctgttgggtatattgagtggcggctttcgcttcctctttcgcgttagcggtatttaccatcatgccgctggcggcagttaacgcaataacaatcctgctcaaacggaataaccgagagttattcatataaatctccatttatcatttatgtcgtaaatatgtaatccatgcaaaatacgtcatttaaagctggcgttatcataattgggaaattgcgactttaataagtggaagtgtgagcggaacgcgccattttattaggcatttgtgctgaagagggaaaattacagtaaaactatcattgcagaaaataatatgagtcgttttatgtgtttattatatatattgtacctgtcgttggcacagcgggacattgcgctactgtgccaacgttttactcatggggctttagcacagaactgtggcaaaaaacgttgatgcgccaatattgctgcaccctgagcgccattaaagtcagaagaactggcggcaataaagcgcacgacctgatgcggcagtggacggcgcaggtacttttgggtcatggcaacgagagtctcgcgtgggaaggcgggcatatccatcacgccaccgcccaggatcaccgcatcgggatcgaacagattaatgctggtggcaatggcccgtgccgcgttttcaagcagactctggacgaaaggggcgttttccgcatggacgaaaagatcgcgcaatgggtaatttcggggctgttgttcgtaccagcgtcttagcgccattccagagcaattggtttccaggcacccaggattgccacacgcgcagtgttgggtcatatctcccagggggatatgacccagttcgcctgccacaccgtgtgcacccgtccacggcgcaccgttcatccacactgcgaaccccatccccgtaccgagataggccgccagaaccagttgttgcgtaaggcggttttctactacgtcccaggagagttgcaggttaacgtcgcgggaaaactcaaccggacaattcagcgtattttcgagcttatcggcgagatcatataaatccgccgctgttaacggcaggttaggcgtagaaataatggtgcgtttatctttactgaccagcgccggaaatcccatcaccagaccatgacagcgagcgttaaagcgcctgagttgctcgtcaatcatttcgccgataccgctcaccaggccgggagcaatgacttctgcggtccgctttttttcgcagtgtagcgtttcaccttctgctgtccgcagacaaaagcggatatgcgttgcccccatatccacgcccgctacgacgttatgctgtttttgcatgaggctgtacctcgctttttgcagccagaatctgcgcggtcataattctccatgcttcgtcgatattttccgcatgattaaacaggccggaagtgccgacgataaagacatccgcccctgccgccatcagtttttcgtaagttgcctggttgcaggaaccgtccacctcaatttcgtactccagaccttctcgttcacgccatgccttcagttcggcaagtttatccagcatttcaggaatgaacggttgtccggcaaagccgggatcgacagtcatgaccgtaattttatcggccttatggatatagtatttcatggcctcaactggcgtctccgggttaaggatcagccccactttcatgtcatgacggcggatttcatcaatcaggcggaacgcctggccgttgatggtttccggatgcagagtgatgaaatctgctcccgcacgcgccagttgagcaatgtaatcctgcggccgcgtcaccatcagatgacagtcgagcggtttagttgccagttttttaacctgacttacgaagaacggactgagtgtcagattggggacaaagtgaccgtccatgatatcgatgtggaagtaatcggcatggctgtcgataaattcgatctgttctttaaatttcagcagatccatacacattaagctgggggagattttcatgttcaattccttacttactgataagacggtcaagggcgacagccgcgataattaatccgcccatcaccaccagttggtaataggtttgtacctgcaaaatattcagaccgttgttgatggtgccgatgatcaacccgccaatcaccacagagaaaatgcgccccttgccgccgaagaaactggtgccgccaatgatggcgctggcaatggcataggtttcaaaacccataccggcaagcggttctgcggcaccgagtcgtgcagtactgacgacgcctgccagacctgcacaaacaccggagatgataaacaccaccaggatgtggaatttcacgtcaatcccggaatagaacgcgctatttttgttgccgcccagtgcgtagatgttgcgcccgagccgcatacgcgttgtcagaaaccaaaggatgagcgcgacaattagactgaagataacggggacaggtatcccaattacgctggcggcaaagaagttcacgaagtcaaaactgaagccgtatacgctgttggcatcggagatcaccagcgtgatcccacggaaaatcgcgttggtgccaagggtgatgatgaacgggtgtagccccgtccagttgaccaggcagccgttgatcgcccccagtgcgccgccaaccagtacaccgccaatcatcgctgcgagaaacgggtcaacacctgccaacatcagtttggcggtcaccataccggaaagcgccagaatcgcgccaacgctgaggtcgataccagcgaccaggatagcgaaaaactcgcccatgccgatcaataccgtcacggagctttgaataaaaatctgggtaatattattggtggtcagaaaatattctggactcaggctaccaaagatggcgacgatgatcgccaggataaaaaaggtgccgtatttatcccagaacagcgcaaagttgaacggtttcttctcgctcgcttcgctttttactcttgtggtaaagcccatgccataatctcctcttcgctcatgtcatcgcgattcgtcaggatttgcgtcagtcgtccttcgcagaacacggcgatgcggtcgcagacggtgataatttcaggtagttcagaactcaccatcaggatgacttttccgtcgtccgccagttggcgcatcactttgtaaatttcggctttcgcgccaacgtcgatgccgcgggtaggttcatcgaaaataatcacttccgggcaacagcacagccatttggagatcaggactttctgctgatttcccccggagagttcggtgatattctggtttacgctatgacatttcagcgccagcagttcgcgttgattttcagcggtacgttgctcgtcaacttcatgaaacaagcccatcgcgcctttatagccgccgtctttcagactgcggctgatcgccatgttctgagcgatggaaaagttggggaaaaaaccgttatcccggcggctttcagtgatgtaagccatcccttttttcacggcatccaggggactacgtggagagatatctttgccattaagacggatttctccgccagcgcgtttatccacgccaaacagacaattcatcagttcagtacgtccggaaccgaccagtccggcaaagcctaatatttctccccggcagacgctaaaactgatatcccggaccttttttctgtcacgactggtgacgttccgcacctcaaaaaccgtttcgtgcgcaaggttgctgacattctccttcatcgcgttaaaacggttttgcagttcgcggcctaccatcagacggacgatatcgtcattactcacatcgcttactatgccgctgcaaacgctgctgccgtctttcatcaccgtatagcggtcgcaaatacggcgaatttccgccaacttatggctgatatagacgatggccgtaccctctttacgcaactgattcatgatcagaaacagatagtccacctctttattggtgagactggaggtgggttcatccatgatgatgactttggcatcgagcatcagcgttttggcaatttctagcatctgcttgtggctgatagataaattcgccactttctcatctagatcaactttcaagcccacgcgtaataacatcatggcggcgcggacacgcatttctcgccagtcgataatattgacgccacagatttttttcgtcagatgacgaccaatatataaattttccagtacggttaattcatcaataacgctgagttcctgataaataatcccgataccgagttgtgccgctaatttatgatccagcttgttatagctaatgttattaatggtaatggtgcctttggtcggctcatgtattccggataaaactttcattagcgtggatttacccgcgccattttctcctagtaatgcatgtatttcaccaggataaaccgttaaattaacgctctttaatgcgtgaaccggaccaaaggacttgccgatccccgccatgcttatatatggcgtggccataaataacctctctgcacgaaatatcgtattattgcctgatggctacatttatcaggtctacgttcaggttattttgttggccggataagacacttcattagcatcatcatccggcatcattcagttttattgagtgaccaggatactatcgaccagtttaaattccggtgctttatccagcgggataaccttgccggatttctcagcgtcaaccatcagcttcagacccgttgcgccgatatccgccgggttctgggcaaccgtcgcggtcatttgtccggcttccaccattttgcgggcttccggaatgccatctgtaccgacgaccagcacttttcccgtttttccggcgtttgcgactgcctgagcaacacccattgccatcgtgtcattcgcgcaatagatcgctttaatattcggattacgttgcaacacgttagtggcgacatccagtgctttaatgcggtcccagtcggcaggctggctggcgacaagcttgatctggcttgcttttttgaaggcttcggtggcaccattacgacgcgcttcaccggaggcgttaccggctttaccctcaatgattgcgacttcaccaccttcagcgcccaatttgtcaataatgaagctcgcgcctttcgccccgacagcaacgttatcggtggtgacaaaagcttccacattgccgccagcttttttcagattatccatgtcgattttttcatcgagattaaccagataaatgccttttttccatgcgcgggcgacaggcatgaccagattcacactggataatggagcgaaggcgatacctttgtaatttttattactgagatcttcaaataactgcaattgagattgaaaatcgccttcactaggagaggcaaaaatatcaacgctgacgcccagtgtttttgcttcatcttcaatgccttttttcatatctacccaaaatgggttggagagggttttcaatacgacagcatattcggcggcagcaaaagcgctggtactcaacattaagcccacgagtgtgccgctgaaatatttcagatatttattcataataatgttctcacggtaaggggacaggtaactccgcgatggcggaattacctttttcttatttcagcgcgcctggactgaagaaatcaacaattgcgccggttttttgcatattaatattagcttgttcaatgttgagctgggcgacagagacaaaaaaagcgtccagcaaagttagttgtaatattcttgcgctggcattacgacctaataacggcgtttccggggctggactgcaaataatataatcggccagtttcgctatcggactatggtagctatgggttatacaaataatctttgccccgttcttttttgccagttctacggccgcttttacatcactggttcgcccggaatgggtcactaccagcacaacatctccttcctgtaacaagctagcggacatcatcatgatgtgagcatcaggataggcctgacagcgtacgccaatgcgcaagaacttgtgctgtacatcagcacagatagcattacttcctccggcaccgtacaaatcccgctgtctggcctgatagaaaaagcgggcggcacggtggatctcatcaacgttgacgatgctctgaccttccataatggtgcgtaaagtgatgttaaataccttattcaccacatcctgcggcgcttcatcaaaagccaactcggaaggcaatacctgttcactctgagaaaaataatcttccagcgcactgcgtaagttacgaaagccgctaaaccccagcagcttacttaccttaactatcatcgcttcagataccgccagagcttctgcgacatctttaattgcgggtgcacaactcaggttaccgggtttgagtaaccactccacgatgcggctttcattttctgtcattccttcctgcttcattcgcaggtaaggcgctaaccctataccgttcggaagcgcactatcaaactcactctggctcatcacgttctcttgtccttgaattgaagacgccactatatcaccacagcaagaacagaaaagatgctggcgacttcacaaaaaaataaaatttataaagtttattttattgtgaacaatggcgagtggcttaaaattttatttcatttaattagtttaaaaacatgatgttatttgtttttctggttttttagatgatagatgttgctggatggtgagtgtctttaacgctattgcgctgtcagatgtaactctgtaaaacagatcaggaaggcgtaattcatcgattttgggtgtttttaattcattaacatcacaaatgttttttgattgtgaagttttgcacggacggggaagatgaatgaaaaagattgcatttggctgtgatcatgtcggtttcattttaaaacatgaaatagtggcacatttagttgagcgtggcgttgaagtgattgataaaggaacctggagcagtgagcgtactgattatccacattacgccagtcaagtcgcactggctgttgctggcggagaggttgatggcgggattttgatttgtggtactggcgtcggtattagcatagcggcgaacaagtttgccggaattcgcgcggtcgtctgtagcgaaccttattccgcgcaacttagccggcagcataacgacaccaacgtgctggcttttggtagtcgagtggttggcctcgaactggcaaaaatgattgtggatgcgtggctgggcgcacagtacgaaggcggtcgtcatcaacaacgcgtggaggcgattacggcaatagagcagcggagaaattgagattcatccactacttgcatggatgagtaatgattaatgtggatagagtttctttttgaggttggctaatgaaacgctttccgctatttcttttattcaccctgctcacgctgtccaccgttccggcccaggccgatattatcgacgacaccattggcaatattcagcaggcgattaatgacgcttataaccctgaccgtgggcgagactatgaagatagccgcgacgacggctggcagcgtgaagtgagcgacgatcggcgcagacaatatgacgaccgccgccgccagtttgaagatcgccgcaggcagctggacgatcgccagcgccagcttgatcaggagcgtcggcaactggaggatgaagagcggagaatggaagatgagtatgggcgatgaggttgggtatggagcaggcatcgcccctcaccccaatggggagagggagaaaacgagcgcaatattcaatatcgagcacaatcggtcccctcgcccctctggggagagggttagggtgagggggccagcgcgcacattccctctcatcacgccaccccaatctccatcccatcaaaccccacctcaaacccactcggtagtgcgttttccatcagccacgcatcaaactggtggctgatatgggtcagaatcacccgtgggctgcggataacctgattcagcgcaagcacggtatttaaatcacagtgattacgcggtgcatccgcgcgcggcgggtgactgcaatccatcaccattacctgcggctgattattgcgtaaaaatttcagcgttttttccggcaagcctgcggtgtcagacagccacgccacccggctgtgtgccgtttccagcagataaccgaaggtcagtttactgtggttgagcggcaggggcgtgacctgtaacccctgcaaatcaaacaccacaaacggttccaccgtgtggctgaaatcaagcaggcccggatgtttaaacagatcgtcgcagccctgttcatccggcgggccgtaaaccgggatcggatcgccaacgccccagcgcagcggaaacagcccctggacgtgatccatatgataatgcgtcagcaaaaactgctggaagcttccggggctccagcgatcggcgagatcgtgcagcccggcgtcgatcagggtgattgcgtcgttaaacttcactacgccgctgcacggttggcggcgatactgcgggctgcgccgcgctctggcgcaggccgcacactcgcagccccatgccggaacgccctgtgcgccgccggtgccggtgagcgtgagggtcaggctcatgttacagcgccttggtgaagcggaagtggctctgctcgtagccttcgcgcagatagaaacggtgcgcgtcgtggcgcttcacgttggtgctaagttcggtcatttcggccccggcctggcgggcttcttcttctgcccacgccagtaacttactgccgacgttcagaccgcgcgcctgcggcattaccaccaactcctgaatttcgccgatccagttgacatgatgcagatgaaactgcaaatgcaggccgatcatgccgacaacttcgccatcaagcagcgccagatggtagcgcatgtttgggtcgcgcagattggcgttaaaacccacgcgaaacgcgtggtggtcaaactccgcctgttttagctcacaaatcagcgcgtaaaccgcgtcggtgtcgtactgcgtggccgggcgaagctcacaagcaggcatggtgtttctccttctgatggatcagcgtcagcagcgtgtcgacgctctggcgcaggctgccgtcattgttgagcgtatggcaatcctgtggagtatagcgggcggcgcgcgccaggcgggcgttaatttcactggcgttttcacggccacggttttccaggcgctggcggaggatctccgggctaacctgtaaacagacgggcagcagcgcgctttgatagcgcgcccgcgcctgcggcagatgggcgcgactgccgttgaccagcacgtcgaatccggcgtgcagccagagatcaatctcgacgccgacgccataatacagaccgttagcgtgccagcttaaggccaacagattttgccccgcgcgggtaaaaaactcctgctcgctcagggcgatatggttttcacttccggcgctggcatcgcgcgtgatgtagcgatgcgccaccagtaactgagtttgttcccgcaggcggagttccgccagcaggctgtctttcccggagccggacggccccattaaccaaatcagttttcccatcatcagaacacccttttaccctgacgccagacgtggtcgatatgaatatgattgtccttgcgatgcgccagcaccaggtcggcgcgtttgccctcgccaatcaccccgcgatcctggagattaagcgcctgcgctggatttttagtcaccagcttcaccgcctgcggcagcgtaaagcggttgctctggtcatcggcgacgcgaaatgccgcatcgagcaggctggcggggtagtagtcggaagagaggatatccagcaggccaagctgcgccagttcactggccgccacgttgccggagtggctgccgccgcgcacaatattcggcgcgcccatcagcacgttcatgccatgcttgcggctggcttccgccgcttcgaacgtggtgggaaattcggcgatcacgctgccaagctggtgagattcagcaacgtgggcgtgggtggcgtcatcgtggctggcaagcgcaatttttcgcgcgcggcacagggcggcgatggattcgcgattcggctggctccagcgtgcggcgagcgccagttgctcttcttcgtactgctgcatctgcgcatcagtgagggagtatttgccctgataatattcgcgatacttctcgcggttggcgaactggcgctggcccgggctgtggtccatcaggctcaccagcgtcaccggctcgcgctgcaccagtttttcaaacagcggcagcgtggtgtgatgcggcagttcgcagcgcagatgcagacggtgctcggcgcggttgacgccgcgtttctgcgtctcttcgatggcgttgatcatcttctccagattctccagccgatcgccgccgtcgcgcacgtcgccaattgccacggcatccagtacggtggtgatgccgctcgccaccatcagcgcgtcgtggctgctcatcgcgctgtgggcaggccagtcaactttcgggcgcggggtgaagaatttatccagattatcggtatgcagctcaatcagccccggcagcagccagccgccttcgccgtccatcgcctccggcaggcggctctggctttcggcaaaggcgcggatttcgccgttctgcacctccaggctaccgcttaccacctcgttttccagcaccagcttaacgttattgataatcatgaagaggctcccattgggtgttagctcaactagaggctcccattgggtgcaggcggtcggcgacgtcattacgtacagcttcgtcatggaagatgcctacgatggctgcgccacgggttttggcttcgcgaatcagttccaccaccgcggcgctgtttttggcgtccaggctggcggtaggttcgtcaagcagcagaatggggtagtcgacgataaagccgcgggcgatgttgacgcgctgctgttcgccaccggaaaatgtgcttggtgccaggtgccacaggcgttccggcacgttcaggcgggtgagaagacgcgcggctttagcggcgcaggcttcacgcggaacgccggtatcgagcagcggctgcatcaccacttccagtgcactgatacgcgggatgacgcgcagaaactggctcacccagccgacggtggttttgcggatttccaccactttgcgcgctggcgcggtgaccaggtctacccactcgtcaccgtgtttgatctggatttgaccttcgtcgggcagatagttggcgtacaggctgcgtagcagagtacttttgccgctgccggaatggccgtggagcaccacgcattcgcccgcgttgacggtgaggctggcgcgattgaggacgggcaggcgcacgccgttttgctggtgcaggatgaaggttttactgacgttttgtacgttaatcatttttcgcctcgtggttcgggtgtcggatgcgacgctgacgcgtcttatccgacctacggggagcgcatttgtaggccggataaggcgtttacgccgcatccggcaccggctcaattctgcaaaacgctactcaccagcagctgtgtatacggatgatgcgggtcgtcgagcacgcggtcggttaacccactctccaccacttgcccctgcttcatcaccagcaaacggtccgccagcaggcgggcgacgcctaaatcatgggtgacaatcaccaccgcgaggttcagctccaccaccaggccgcgcagcaggtcgagcaggcgggcctgcacgctcacatccagcccgccggtcggttcatccataaacaccagcttcggatgcgtcaccaggttgcgggcaatctgcaaacgctgctgcataccgccggaaaaggtggtcggcaggtcgtcgatccggttggcgggaatctccacctcttccagccacttctgcgcggtggcacgaatatcgccgtaatgacgtgccccggtcgccatcagccgctcgccgatattgccgcctgcgctcacctggcggcgcaggccgtcgagtggatgctgatgcaccacgccccattcggtacgcagcaggcgacggcggtcggcctcgctcattgcatacaggctacggttctcgtagtgaatttccccctgctgcggcgtcaggcgcgcggagatgctcttcagcagcgtggtcttcccggagccggattccccgacaatgcccagcacttcccccggccataaatcaaaagagacatcgctaaagcctttgcccggcgcgtaaaggtgggtcaggttattgacgctaagtaacggttgattcattggttttttgcctcgctctgttggcggcaataatcggtatcggagcagacaaacatgcggtttccggcgtcatccagcaccacttcatcaagatagctgtgggtgcttccgcagatggcgcatggctcatcccactgctgaacggtgaacgggtgatcgtcgaaatcgagactttccacgcgggtaaacggcggcaccgcatagatgcgcttctcgcgccccgcgccgaacagttgcagggcgggcatcatgtccatttttgggttatcgaatttcgggatcgggctcgggtccatcacgtagcgcccatttaccttcaccggataggcgtaggtggtggcgatatgaccgaagcgggcgatatcttcatacagtttcacctgcatcacgccgtactcttccagcgcgtgcatggtgcgggtttccgtttcgcgcggctcgataaagcgcagcggctcggggattggcacctggaagataattatctgatcttcggtcagcggcgtttcggggatgcggtgacgcgtctggataaccgtcgcatcgtccgtacgttccgtggtgtttaccccggtcacgcgcttgaagaagttgcgaatgctcacggcgttggtggtgtcatccgcgccctggtcaatcaccttcagcacgtcgctttcgccaatcacgctggcggtaagctgaatgccgccggttccccagccgtacggcatcggcatctcgcgcccgccaaacggcacctgataaccggggatcgccaccgcttttaagatggcgcggcggatcatgcgtttggtctgctcgtcgaggtaggcaaagttgtagccgctcagattagccatggttctgctcctgttgcagacgtttgagtagctccagttcggcctggaaatcgacgtagtgggggagtttgaggtgactgacaaagcctgcggcttcgacgttgtcggcatgtgccagcacgaactcttcatcctgcgccgggcctgtcgcgtgctcgccgtactccggggcttgcagagcgcggtcgaccagcgccatcgccatcgctttgcgctcgctcatgccgaacaccagcccgtagccgcgcgtgaagtgcggcggctcacccggcgggtcgataaaaccgttaaccatttcacactcagtcatcagcagttcgccgacgttcaccgcaaatcccagctcttccggcacaatgctcacgtcgatatagccgctgcggatctcgcctgcgaacgggtgattgcgcccgtaaccgcgttgggtggagtaggccagcgccagcaaatagccttcgtcgccgcgcatcaactgctgcaaacgggaggagcgactgcaggggtaaaccggcggcgtgcgggtgatgtcatccggctgtgcgccgctatcctcttcaaacttcgccagcccctgacgcgccagcaggctgaaaacgtgcgggctcggctgctgttcgctgtcggcggtggtcagcgtcggcgcttcgccgtttgccagcagggtaaaatcgagcaggcgatgggtgtagtcgtaggttgggccaagcagctggccgccgggaatgtctttataaacggcggagatacggcgttcgagacgcatcccggtggtgtcgagcggctcgcttaccgccagcttcgccaacgtggtgcggtaggcgcgcagcaggaaaatcgcttcaacgttatcgccgctggcctgtttcagcgccagcgccgccagttcgcggtcggcaatgccgccttcggtcatcacgcgatctaccgcgaggttaagctgctgttcaatctgggcgacgctcagttcgggcaaatcggtatcgcctcggcgtcggctctcttgcagggcgtgggcggcgtcgatcgccttctcgccccctttcacggcaacgtacatcagcacacctccacatgagtggttcgcggaatagccagcaggcgctcgccacaggtcaggatcaggtcgatgccgagcgggaacggatgcgggcgctcggtgagttcgtgcagaatgcactccggcagctgcggagcgatcattcgttcttcggcaatacccgcaccagtaaggcgcaacatgcgtccgccgctcaggctggcgacctgtaaaatcagcgtcgcacccgcttccggcgcaacggcggtgccggtggaaagggcgttgagctgttcgctggaaatcgcctcatccgtcaccgcgaaggtcgcctgttccggctggctgaccagcggcgcgttggtatgaaaacgcaggctctggttgacgatatcgttatttaatggggtagaaagccacaccggcgtgtcgttatcggccagcgtcagcagcacgctggtggtggcgatattcagcggttgccagccgcgtttgagctgatgcagggcgacaatcacgcccggctcgctcatggcctttaacaggcgacgaaaactgtgctgggcatcctgcacgggaagcataaaagcggtttccagggtcatgcgttgtctccgcgaaccatcgtaaagaagtcgacccggctggcgttcacttcggcctggcgtgcggcaatgcgtgccatacggtcagcgtccagcggggcaataagggtttcacttaagttttgaaagtggcgagattgctgcatcagcgcgtcaatcagcgcgcagcgttcggcgtgctgtttatcacgcccctgcacccagctgtagccgagcgtgccgtcagtcaggcgcacggcggcgcgggtcagcgtggcgtcgccggcaaaaaaacgttcgccggtgccgcccatccgcgcctgaatctgtaccaggccagtttcagcggcgcggatcacctcatagtcggcggtgatgtttagcgcgttcaggcgtgctgccagttcagccggttggctgtgcgccagcacggacatccagtgctggcgggtcgcggtatctgcgtgcattcagtgctccatagtgaattcaatcatgtcggcgcgcgtcaggctgacggagtactccgccgggctgctttcaccgtcacggtggttaagggtgcgcacgcacagcagcgggctcatattcgggatttcaagacgctggcactctttggcctgggcgcggcgggcgctgatccgcgtctggctgcggcgcagcgcaattccggtttgctcgcgcagaaaatcgtgcaggctgccgctgtcgaagcgttgcagcgtcggccagagggtgaggtccgcgaagtagtggtcgattaaacagagcgcgacgccgttgacacgacgcagggtgcgcaggtggatgacgttctccccctcggtaatccccagtgcgtcagcgacgtggccggacgcggggcgcaatacgctaagcagtttttcgctggtgggatggctgccctgatccagcagattctggctaaaacgcgcctgggcgttgagcgggtaatcgaacgggcgcatcagcaccagcacgccgacgccctgacggcgctgtacccagcctttttccaccagttggtcgatggcgcggcgcagggtgtggcgattcacctcaaagcgcgctgccagttgctgctcggcgggaagatagtcgccgcagcggtagtgttgacgaagctcctgctcaagttttgcggctatctcttgatagcgtgttgggtagctggtcggatgtgtagacaagtgcatagatatcaatgcctcgcttatcagataaagtgcttacgcaaccgttgagagaggaaatccagcaggctgaccgtgacgatgataagcaccatcagggcgcaggtttgttggaactggaaaccgcgaatcgcttcccacagggtgacgccgatcccgcctgcgccgaccatgccgacgacggtcgccgagcggacgttggattcgaagcgatagagggagtaggagatcagcagtggcatcacctgtggcagcacgccgtagaggatctcttcgagcttgttggcaccggtggcgcgaatgccttccaccgggccgggctcaatcgcttccaccgcttcggaaagcagcttggagagcacgccggtggtgtggataaacagcgccagcacgccagcacgccagcgaacgggccgaggccgacggcgaccacgaacagcatggcgaagaccatttcgttaatggcgcggcaggcgtccatcaggcggcgaacgggctggtaaacccaccacggcaccaggttttcggcgctcatcaggccaaaggggatggagagaaccaccgccagcgcggtgccccagacggcgatttgcagcgtgacggccatttcggtgaggtaatcctgccactggctgaaatcgggcgggaagaagtcggcggcgaacgtcgccatgttgccgccgtctttgatcagcgtaagcggggccatttccgcgccctgccacgagacgaccaacacggcgagtacaacggcccagctcagaagcgagaaccagctgcgcttgggtggggcgatggtgatggtttgcatgtttggctccggtctgtaggccggataaggtgcttgcaccgcatccggcatcaacgcctgcacattgtcggatgcgacgccggggcgtcttatccgacctacgatttactgcaccgctttactcacgctactcatcgcgcttagcgcgttgttcaggcggtccaggtcatccagctgcgcctgaatctcggtggtttttgccagcttgtcctgctcattcagtcctttattgcttttcacgccctgcatctctttaaacagcgcgagctggcgaatcggcaccagttgcaggtcgctggaagcgcggaatggcgcccagcccaggcgttccagcaccgctttttcttccggcgttttgccgtagttcataaagaagtcgtagatcttgtctttggtggtttcggaaagattcttgcgccagacgatcggatcgcctgggatcagcgggctcttccagatcaccttcagttctttcagcttctctggcgcggaggttttcagcttgtcgaggttttcggtgttgttggtggcaacatccacctgcttgttggcgacggccagcgcgttggtttcatgcccggcgttgacggtgcgcttgaagtcgctggcggagatattgtttttggcgaagacgtagtagccggggacgaggaagccagaggtggagttaggatcgccattgccaaaggtgagatctttccgcttcgccagcagatcgttcaggttgttgatcggactgtctttgttgacgatcaacacgctccagtaacccgggcttccatccgccgcgaccgtctgggcgaagacctggccattggcgcgatccaccgcttccatcgcgctcagattgccgtaccaggcgatatccactttattgaagcgcatcccctggataatgcccgcgtagtccggggcaaagaaggcgttgaccttcacgcccagcttcttctccatatcctgcaagaacggcgtccattgcggtttcaggttttgctgactttccgtactaataatgccgaaattcaacgccttttcctgctcttcggcgtgcgccgggcttaacagggtgctgaggctgaacatgctggtgaaggccaggctggcaattatcttagcgttcattcgttttcctcaatgatggggatgtcaggcagctttcgcgttctcttcgacgcggttaatgctgcggtagagatggtcaaaacgttcgttatcaaactgttggctgctgccgtcgtagaagacgtgcccctggcgcagggcgacgatgcgttcgcagtagcgcagggcgtaatccacctgatgcagcgtgacgaccacggtgatgccgtcgttctggttgatgtcgcgcagggtgtccatcacgatgcgcgcactttctgggtccaggctggcgatgggttcatcggccagaatcactttcgcctgctgcatcagcgcacgggcaatcgccacacgttgctgctggccgccggagagggtggaaacgcgctgatgggcaaaatgcaccatgccaacgcgggtcagcgcctgtaacgcgcgctgtttctgctcgccggtgaaccagctaaaacaggtgcgccagaacggcgtgctgccgagcgcgccaatcagcacgttctccagtacgctcaggcggttcaccaggttgaattgttggaatatgtagccggtatgggcgcggcttttgcggatatcgcgggccaggcggccttcgcgctggactgtgcggcccagcagctcgatatggctaccgacagatttatcgccggtaatcaaaccgcttaagtgacgtaaaagggtggattttccggaaccgctcggcccaagcagagccaccatttcaccgtgatgaatgttcagatcaaccgcatgcagcgcctgatgctgattgaaggttttggcgagcttctcgacacggataatcgtttgcatgatgcagcctccctaaaaaagtggctccatcgtggcggattattgtgacgatttggttaattaaaagtgactaacagatgaagagttaacgggaattcgatgacagtgcgggagggcgggcctcccggcgggttattgcgttggttgttgtttgacgacattaatcatccacggtacgccaaatttatcggtgactttgccaaagccatgcgcccagaaagtttcctgccaggccatttcgatttttccgttagcggcaagattgtcaaaccagcgttttccttcttcgacctgttggctatcgagcaccagcgtaaagccggagtagctggcttttccactcggcatggcatcgctcatcatgatgtcgcttccggcaatgcgcacattggcgtgggcgatggcggtatcgggaaattgcattccggaagggcagttctcggcgctgtcctgcgcactttttggcatttcgccgaagctgattttatagagcagttccgcgcccaacgtacgttgataataggcaatcgcgtcggaacagttaccggcaaaagagaggtagggacttaacggcatgatggtgacctcagttaagagaagccagttaagtgtagttcgaaatttatacagatgagaggcggcctgataagacgcgcgagcgtcgcatcaggcagtcggcactgttgccggatgcggcgtaaacgccttatccggcctacggagggtgcgggaatttgtaggcctgataagacgcgcaagcgtcgcatcaggcagtcggcaccattgccggatgcggcgtaaacgccttatccggcctacggagggtgcgggaatttgtaggcctgataagacgcgcaagcgtcgcatcaggcagtcggcaccgttgccggatgcggcgtaaacgccttatccggcctacggatggtgcgggaatttgtaggcctgataagacgcgcaagcgtcgcatcaggcagttggcactgttgccggatgcggcgtaaacgccttatccggcctacggagggtgcgggaatttgtaggcctgataagacgcgcaagcgtcgcatcaggcagtcggcaccgttgccggatgcggcgtaaacgccttatccggcctacggagggtgcgggaatttgtaggcctgataagacgcgcaagcgtcgcatcaggcatctggcaccgttgccggatgcggcgcgagcgccttatccggcttaccgatcacaatacaatcagttctttttcacaaactcagatttcagtttcatcggaccaaaaccgtcgattttgcaatcgatgttatggtcgccttcaaccaggcggatgtttttcactttggtgccaattttcagcatgctagagctacctttcaccttcagatctttaatgatggtaacgctgtcgccgtcagccagcagattgccgttagcatctttaacgatcagctcgtcgctttcctgtgcaggttctgcgtcgttccattcgtaggcacattccgggcagatgtacatgccgttatcttcgtaggtgtattcggagttgcattttgggcagtgtggtaaactcatgtggatttcctcaaaagtcagcagggcaaaagcgccaaaaaacggcagattgccgaaaaaggccgcaattatacacaaaatccctgagtttgtcgggggtactgctgattttagacgacgatcgttttcatttgaaaggaaacgcaaaaagaaaataatctttttgcctctatttattatttaagataatgttaatgctctacttgttctttttttaattcacatgatatttttatctttctgacgttttaaacgtatcagaagacgttatttattctgataaaaaacaacacactaaatataaaattatttcttgcagtaattataaaagccgaaaacagaactcaaaaacaatctggctaaataaaataacaaaatttgctttaaggaagaattttctatgtacacacagaccctgtatgagttaagtcaggaggctgaacgcctgttacagctttctcgccaacagttgcagttactggaaaaaatgcctctctctgtacccggagacgacgcgccacaactggctttaccctggagtcagcctaatatcgccgaacgtcacgcgatgctgaataatgagttgcgtaaaatttcccgactggaaatggtgcttgcaattgtcggtaccatgaaagcagggaaaagtaccaccattaatgccattgttggtacggaggttctgcctaatcgtaatcgcccaatgactgcgctgccgacgcttattcgccatacgcccgggcaaaaggaaccggtactgcattttagtcatgtcgcgccaatcgattgtttaattcaacaattacaacagcgcctgcgtgattgcgatattaagcatctgaccgatgtgctggaaatagataaagatatgcgtgcgcttatgcagcggatcgaaaatggcgtcgctttcgaaaaatattatctgggtgcccagcctatttttcattgtctgaaaagtttgaatgatttagtgcgactggcgaaggcgctggacgtcgattttcctttttctgcttacgccgccattgagcatattcccgtgattgaagtggagtttgtccatctagcggggctggagagttatcccggtcagttgacgttactggatacccccgggccaaatgaagccgggcaaccgcatctgcaaaaaatgcttaaccagcagctggcacgcgccagcgcggtactggcggtgctggattatacgcaactgaaaagcatctccgatgaagaggtccgtgaggcgattttggcggtggggcaaagcgtgccgctgtacgtgctggtcaataagttcgatcaacaggatcgtaacagtgacgacgccgaccaggtgcgggcactgatttccgggacgctgatgaaaggctgtattacgccacagcagatatttccggtgagcagcatgtggggctacctggcgaatcgggcgcgctatgagttagccaacaacggtaagttaccaccgccagagcaacaacgctgggtggaagattttgcccatgccgcgcttggcaggcgctggcgtcatgccgatctggcggacctcgaacatattcgtcatgctgccgatcagttgtgggaagatagcctgttcgcccagccaattcaggcgttgcttcatgccgcttacgctaacgccagcttgtatgctctgcgatctgccgcgcataaactgttgaattacgcgcagcaggcgcgggaatacctggattttcgtgcgcacgggttaaacgtcgcttgtgaacaattgcggcaaaatatccaccagatcgaagaaagtttgcagctattgcaactcaatcaggcgcaggtgagcggcgagattaaacatgaaatcgagctggccctgacctccgccaaccactttctgcgtcaacagcaagatgcgctgaaggtgcagttagccgccttgtttcaggatgatagcgagccgttaagcgagattcgtacccgctgtgagacactgttacagacggcgcagaacaccatcagtcgcgactttacgctgcgttttgccgagcttgaatccaccctttgccgggtgttaaccgatgttattcgccccattgagcaacaagtcaaaatggaattgagcgagagtgggtttcgtcctgggtttcattttcctgtttttcacggcgtagttccccacttcaacactcgccagctgttcagtgaagtcattagccgccaggaagcaacggacgagcagagcacgcgtttaggcgttgtgcgtgagacttttagccgctggttgaatcagcccgactggggacggggaaatgagaaaagtccgacagaaacggttgattacagtgtgttgcaacgagcattaagcgcagaagtcgatctctattgccaacaaatggctaaagttctggcagagcaggtcgatgaatctgttacggcaggcatgaatacttttttcgctgagttcgctagttgtttgacggaattacagacgcgtttacgcgaaagtctggctctgcgtcaacaaaatgaaagcgtggtcaggctgatgcagcagcaattgcagcagactgtgatgactcacggctggatttacaccgacgcccagctgttacgcgatgatattcaaacacttttcacggcagaacgatattgaccaagacgttacttgacggccccggtcgcgtgctggagagcgtttatccccgctttttagtggatctggcgcagggtgatgatgcccgccttccacaagcccatcagcagcagtttcgtgaacgactgatgcaggaacttcttagccgtgtgcagcttcagacatggacgaacggcggcatgttaaatgcgccgcttagcctgcgtctgacattggtggaaaaactggcgagcatgctggatcccggtcatctggcactgacgcagatcgcgcagcatctggcgctgctgcaaaaaatggatcaccgccagcactctgctttcccggagctcccccagcaaattgccgccttgtatgagtggtttagtgcccgttgtcgctggaaggaaaaggcgttaacgcaacgaggcctactggtgcaggcaggtgatcagagcgagcaaatttttacccgctggcgtgctggggcgtataacgcctggagcttgcctgggcgctgttttatcgttctggaggagttgcgctggggggcatttggcgatgcctgccgtctgggaagcccgcaagcggtggcgttgttgctgggtgatttgctcgagaaagcgacacaacatctggcagagagtatcaatgcggcaccgaccacgcgtcactattaccatcagtggtttgcctctagcaccgttccgacgggcggggagcatgctgattttttaagttggctgggaaagtggaccacggcagataaacaacccgtttgctggagtgtgacccaacgctggcaaactgtcgcgctggggatgccacgactctgtagtgcgcagcgtctggcgggggcaatgctcgaggaaatcttctctgtaaatttggcgtaaataatcagttacatcaatgagtcctaaacgaaatccatgtgtgaagttgatcacaaatttaaacactggtagggtaaaaaggtcattaactgcccaattcaggcgtcaactggtttgattgtacattccttaaccggagggtgtaagcaaacccgctacgcttgttacagagattgcatcctgcaattcccgctccccttttgcggccgtcgcgctgatttttctggcgtttgcggaaatgggccaactctgcgaggaaagctatgctgaaaaggaaaaaagtaaaaccgattacccttcgtgatgtcaccattattgatgacggtaaactgcgtaaagccattaccgcagcaagtctgggtaatgcaatggaatggttcgattttggtgtttatggttttgttgcttacgcattaggtaaagtttttttcccgggggctgaccccagcgtgcagatggttgctgcacttgccactttctccgttccctttctgattcgaccgcttggcggactcttctttggtatgttgggcgataaatatggtcgccagaagatcctcgctatcactattgtgattatgagcatcagtacgttctgtattggcttaataccgtcctacgacacgattggtatttgggcaccgattctgctgttgatctgtaagatggcacaaggtttcagcgtcggcggtgaatataccggggcgagcatatttgttgcggaatactcccctgaccgtaaacgtggctttatgggcagctggctggacttcggttctattgccgggtttgtgctgggtgcgggcgtggtggtgttaattagcaccattgtcggcgaagcgaacttcctcgattggggctggcgtattccgttctttatcgctctgccgttagggattatcgggctttacctgcgccatgcgctggaagagactccggcgttccagcagcatgtcgataaactggaacagggcgaccgtgaaggtttgcaggatggcccgaaagtcagctttaaagagattgccactaaatactggcgcagcctgttgacatgtattggtctggtaattgccaccaacgtgacttactacatgttgctgacctatatgccgagttatttgagccataacctgcattactccgaagaccacggggtgctgattattatcgccattatgatcggtatgctgtttgtccagccggtgatgggcttgctgagtgaccgttttggccgtcgtccgtttgtgctacttggtagtgttgccctgtttgtgttggcgatcccggcgtttattctgattaacagtaacgtcatcggcctgatttttgccgggttactgatgctggcggtgatccttaactgctttacgggcgttatggcttctaccttgccagcgatgttcccgacgcatatccgttacagcgcgctggcggcggcatttaatattagcgtgctggttgccggtctgacgccaacgctggcggcctggctggtcgaaagcagccagaatctgatgatgcctgcctattacctgatggtagtggcggtggttggtttaatcaccggcgtaaccatgaaagagacggcaaatcgtccgttgaaaggtgcgacaccggcggcgagtgatatacaggaagcgaaggaaattctcgtcgagcattacgataatatcgagcagaaaatcgatgatattgaccacgagattgccgatttgcaggcgaaacgtacccgcctggtgcagcaacatccgcgaattgatgaataagctgaaacggatggcctgatgtgacgctgtcttatcaggccaattgaactcttaaggttcacttaatctctgacgcgcatactctcctccaggttaacggaggagagtgcaatgaaaaaccgtgtttatgaaagtttaactaccgtgttcagcgtgctggtggtcagcagctttctttatatctggtttgccacgtactgatctttcttcagccgtacccaggcccgcgtgccggaagtctcttgccggttttgcaggaaaaactgcccgtgatgcaactgtgtaatgcggctgacaatacttaaccccagaccaatcccgccataacggctgtccatacgtacaaacgctttactcaactccccgcatttactctcatcaatacctggtccttcatcttcaactgccatgaccgctccgtcatcttcttgcagcttaatcataatgttgctgccttgcgggctgtaacgatgggcgttttctaccaggtttcgcaataacatccgcagcagggttgcatcaccctgaacggtgatgtcggcggcgctctctggcaatagcagggtttgctgtcgctggtcgagcatggtactgagttcgtcatagctggggagaatgacatcttccagcagttttacatgttgataattaccggaagaaaaactctgtccggcacgcgccagttgcagcagctgggagacgctctccatcatctgatcaagccgtgccactaacggtgctacatcaatgtgatgcgttttcgccagcagttccagatgcaaacgcacccccgccagtggcgttcgcagttcgtgcgcgacgtcagcggtaaacaacctttcgttatccagcgtgctggtcaggcgactgaccagatcgtttaacgcgctaaccaccgcttcgatttcgagggtggcgctgtgaatggcaatgggcgttaagttgtcggcggtgcgcgcttccagctctttttgcagctccgccagcgggcgggtgatgcggcgtaccgcctgatagcagataaatagcgtcaggctgaccataaagacgccggggacaatcaggctggcgaccgcctcgcggatctcacgcatgatgtggcgatcgttgttgcgattgtcgcgtagcgcctgctcaaacagctgaatctgctcggtactttcatgccatagccagaagacgctgatcagctcaaacaccaacaaaatggccccgatggtcaatatcagccgttggcgcaggcttattggtcggcgcagaaaatgcatcagattcaattagttttcctcattcgcgaccagcatatagccaaagccgcgcacggtgcggatacgggctttgcccactttgtcgcgcagattgtggatatgcacttccagggtgttggtgctgggttcattgtcccagttatagatgtcgttgtagagaatttcccgatgcaccggactgcctgctttgagcattaaccgactcagcagagcatattctttgggcgtcagaatcaactcttcaccgcccatccatacctgacggcgacccatgttcagcgtcagattgccaacaatcagctcactttcgccctgattattatggcgtcgtagcagggcgcggatacgggcatgtaactcttccagcgcaaaaggcttcaccagatagtcgtcggcaccgacatccagcccggcgattttgtcggtcagcgtatcgcgagcggtgaggatcagtaccggcagggtatattttttctgccggatacgggcgagaaaatgcagtccatcttcgtcgggtaaccctaaatccagtaccaccaggctgtaatgacctgcctcaaggctttgttccgccatccgcgcggttgtcacgctatcgcacgcgtagccttcggtttgcgccgccagaatcagtccctgcaataacagcgtatcgtcttcaacaatcagaattttcattcactcactctcctgcaagtttgcagaatatcatccgcagcctggtaatacttcgtctcaacgccagttaatcccaatagcgtggagaataaattgtcttgactatagtgttgcgtttgcgcctgtttttgcaggcagttctggtcaacctgataccgtttttgataatcctcgctcagccacagcagcatcggcacctgtttttggctatccggggcgatggcataaggcagaccgtgcagatagatgccattttcacctaagctttcaccgtggtcagaaagataaaccaggctggtggtaaatttatcctgatgttctttcagcagattaatcgctttatcaacaatatagtcgacgtaaaccagcgtgttgtcgtaagtgttcaccagttgctctttggtacaggtctggatctcattggtgtcgcaggttggggtaaatttcctgaactgaggcggatagcggttgtaataggtcggaccgtggctgccgatggtgtgtaagacaatcacgccatcaccttgcaggttattgatgtactcttcaagcccgtggaacagcacttcgtcatagcattcgccgttgatgcactgatcaggtagattcagcgcggtgacgttctggtgaggcacgcggtcgcaggcacctttacagccgccatcgttgtcattccacagcacgttgatgcccgctcgctgaatgatatccagcacgccttcctggtgctgtgccagctcttctttgtagtgctcacgcggcatatcgctgaacatgcacggtacactaactgccgttgccgtgccgcaagatgcggtattagggaaatagaccacgttatctttcgccagccgcgggttagtttcacgcgggtagccgttgagggagaagttctccgcccggctggtttcgccgacaatcaggatggtcaaatttttacgtttttcgttctgcattaacgggttgcggtgcgcgtcttcaccaattcgcaccagcggcagatttgccagtcgctgatgggagtaccaactccagctggcaacaatgctgttagaggggcttaaggatttcaccagctctttgttattgcggaacaagctggcgtagtctttataaaacagtgcggcgaccagcaaaatcagtagtacagaaaccagaatattggctccacggaaaagaacactgcgcagacggctggtggcaggtttgatttttatccagcaggcaatcagcgcagcaagcacgccgctgaatcccagcgttaataacatttgcggtgtcatcagcgcataactttctgccggagtggtatcaataatattggcaatcatgctgcggtcgatgacgatgccgtaagtcattatgaaatattgtgcagccgcgccaaccagaataaacaggcaggccagtggtcgattaagccataagaaagagcttagtgtcaggacaatattaatcacgctgaaagcgacgaccggcatgctcaagaaaaccagtacgttatgcaggctatccagcggcagcgcctgcaacacctgtttaaaaaaggcaatattcaggcagatagagatataaaaagcggccaacaatagccaggcgagtaaattcaaagagggtctttttagtaggcgcttcaacatcacggtgtttccatcgaacaaagtgcgcatatgctcgcaaagcaaaattaagccaaccttaagttcttaaggttggcttttatgtttgctggattaaggggaattaatctttgcttattggtgcatctaagggatacgggtttttatgtagccggttgtaattcagcgcatacatggcggtgatgaccatcagggtgacaaaactccacataacctctttcgctccggaccccaccacggcccagatgcagtagaggaaggcaatggtagtaactgccagatatgccgggcgtgctttaccaaagtgaccgtgtccgagcagcagtaacgccgcacaggtgtaaagatatggcaccagtgtaaagatgacgctgacggaagaaaccagaccgaactctttggtcgcgtttggactaatgctgctgagctggaagatggtcatcaaaataccgacgataatcagccccgccactggcgtacccgctttatttacacgggcaaaaatcggtgggaacagtccgtcatcggcagcggctttcgccgtttgacccgccagcaacgtccagccgcccagactacctaagcaacccgcagctgcgcagaaggaaacaatggccccggcggtgtcacccaacgccatccgtgcggcatcaccgaatgggctagcagaaacgcgcagtgcggcattagggatcatccccataatcgcggtggtagaaagtacatagcaaacggcggcaatcaataccccaccaatggtggcgatagggacattgcgtttcgggtttttcaccacacctgcggcaacggaggcactttccacaccgatgaagctccacagcgtaacgttaagggtactttgaattgcaccgaaggtgcccaggccgctgacgttccatgccgccatataggtttcaccacggaaccagaaccagccaaatacggcaatcccgacgatggggatcagcgccagcacggtggcaactgcctgcacacgggtgatcattttcggaccgacaatgttcagcaggacgaagatccacagcaccacgacgcaggtgatggttaataccaatggatctttcagaatcgggaagaagtaacttaaatatcctacgccaatgaccaccatggcgatattgccgatccagcaggccagccagtagaggacgttggtttgataaccgagaaacgggccaaagcagcggcgggcgtaagcgtaagaaccaccaggacttgggtcgaggaagctcattttggcgtataccatgctgagccccagtgcaccgataatcgtcaccaaccatccataaatggcaatcccgccagtagaggccaggtttgcaggtaacagaaaaacaccactccccataatattcccgctcaccatcagggtgacggggattaagcccactttgtgagcatcagcatcgctagacataattaaactcctgcgaaggcgagcttcgtgacaataaattacgtcatatcatacgcctgcattcgatagttgaattattatcgaccgggttatcgctgatgccgttattaatatagctcttcgttaaggttaaaaatcaggcgacagtgcgttctctgtgctgactaacataatgcagcggcgtcataccgtagaagtctttaaagacagaaataaagtagctcgtactgttgtagccgcaggactgacttacctgagagatatttttaccgtccatcattaattcatttacggcataacgcatgcggcaggtggtgattatttggctataactggtgttttcgcttttcaactttttctttaacagacttgggctaagacataaacaactggctaccatactaagattccagtctttgtgaatatcgctttcaataatttgataaacgctgtcacttacacaattacgtaacatatacatcattaaactaacgaattttttactgtcgagaaaacgggatagcaccgtgaataataatgcgcgtgttcgttccttttcactctcagtttctgcgggcatcatgctgtgttgcgcggcaacgcgaaagacgtctggcgtcaggcatggcagggtgagtatgggcgtagcgctacgttgccatactggtatttggctgagatctttattcagaaaccggaggtaatctttgatgatgtcgtgactaatatgagcaaccaaagtgttgttaagagaggagacgtcgataatattattttcacaatttaataacgccatatggttagctttaaggctaataggttctttcccattcacccttatccagacatctttttcagtcaataaaacaatacaaggttggtcgctgcaaatcctcatacatgtactcctgagtgcgaataaaagaccagttctcgctaaagcaaagcgataccgggaaatggttatataattgtatgatgaatataaacatgcataaaaataacgagttttactaatagtacaaatttttatagtaatttctcatgtacatatttttttacaggataaataacaggcaaaaaaaagcgcggggtggggccgcgcaaaaagtatgacatttttgtttgcagcaatttttatgaaaacgttgccatactcaaaaggcctaaggccaggcggcgtaatgttatttaaacaattacgccttcagcggaatagtggttacgctttcacgcacataacgtggtaaataccgtcaataatttcagtcccttcagtttcgtgttcaaatccagggaaatggtggtcccaggattgcaggctgcgtaaataacttacttgcggactgtttttatcgccgaagttttcaccagacagcagcatcgggattcctggcggatacgggataacactgtttgccgcgatgcgtcctggcagattttcaatggataccagttcgacattgttgtcgacaatcgcgttgtacgcttcacgcggggtgacttccgccaccggcaggccggaataggcttcgttcaaccgtgcgccagggttgttttctttcagccaggcaaacatggtgtcacccagatcgtgaatccccatgttcgcgtaagtgtcaggatattgttcaacaagttccggcatcacctgcgccagcggtgtgttggcgtcatagtggcgtttgaaggagcaaagggtgttaaccagagttccccatttcccacgggttacgcccatagagaacaggaacataatttggaagtcagtggtgcgggtaggtacaatgccgtggcgaccaagccaggcagtgaccagcgccgccggaacaccggtttcttccagttcaccatcttcacccattcccggagcaaggatgctgactttaatcgggtcgagcatactccagttatccggaatatctttgaagccgtgccagctttcgcccggatgcattacccagcagtcctgaacggtggtcagcagtttggttggtgcgtcagcaaagtcataggttttgccggtttgtgggtcggtgacgacttctttgttccacggtttgaagaaccagctaccgtcagcggtgaactctttatatagccgcgccatcgcctgacggaaatcaaccgcttcgtcaatcacttcctgtgtcagactcaggccgctgttgccgtccatcatgctcaccgccacgtcgttggatgcgcagatggcatacagcggggaggtggtggcatgcatcatgtaggcctggttgaagcgggagaagttaatcgccccacgaccttcacgtacatgaatataagaagcctgactcagcgcattcagcagtttgtgggtggagtgggtggcgaaaacggtaggaccgttgtgatcgccaggttcgccgcgcatggcatagtgatcggcatagatcgggttgaaacgtgcatagccgtaccaggcttcgtcaaagtgcagacgatcggaggttttttccagcagatcctgcgcttctttagcgttataacacacgccgtcataggtgcagttggtcaccacgcagtaagacggtttttgcccggctttgtctttggtcagcgggctttcactgattttcttctgcaaggtttcaggttgcatttcctgcggatagattggcccgataatgccgtagcggttgcggcttggcaccatatagaccggtttcgcgcctgtcagcatcaaaccttgttcgatggatttatggcagttacggtcaacgaccacgacatcgttatcggtcatgcaagcctgcatgatggtgcggttagagccggaagtaccgacgactacgctccaggagcgatcggcaccaaatacgcgtgcggcatatttttcgctttcgccaaatgcgccagtatggtcaagcaaagaaccgagggaagttcgttcgatgcccatgtcggtgcggaacagattttcaccatagtagtcatggtagaaacgtccggcgggtgttttggtaaaaccaacgccgccctggtggcctggcgctgcccaggaatattcatggatgtcactatatttcatcagcgcgctgaacagtggcggcaacagctgctggcggtagcgggtcatcgcggcaacggcgcgtccggcgataaagtcggcggtatcttccagaatccaggcgaattcatcgacaagctccagcaggtcgcgatccattgcggcgagggctttttcccgatcgcccaacaggaagaccggcacgttttgttggcgctcatgaagcttaccgatcaattgtctgacgttttgatgttcgtccggatgttccatttgatagctgaacatcaggcagtcaatggcttcgttactagagagaatggcaaaaccatcatcaaaggaggtggatttaatcacggtaacattttgctggcttaaagcatctgccagacgctcaacggcgttaccgacccaggtgtcttgatggagaaactcgctttcaacaattaatactttcatcattgcttacccggttatgaaggaatcttcgttgcgggcaagtatcttccggccttttcgggctgtaaagcgcgtgaaaaacaaacatttttgaaatatttagttttataaacaatacgttatgtgattattttaaattattttcactgcttattatcgacggctaaactatttttttggctgatactgatatcgtctttagccgggaaacgtctggcggcgctgttggctaagtttgcggtattgttgcgggctcatgccgacatatttgccgaacgtgctgtaaaaacgactactactacgaaagcctgccgtcagggcaatatcgagaatacttttatcggtatcgctcagtaacgcgcgaacgtggttgatgcgcatcgcggtaatgtactgtttcatcgtcaattgcatgacccgctggaatatccccattgcatagttggcgttaagtttgacgtgctcagccacatcgttgatggtcagcgcctgatcatagttttcggcaataaagcccagcatctggctaacataaaattgcgcatggcggctgacgctgtttttgtgtgtgcggctggttttattgaccagaatcggttcccagccagagaggctaaatcgcttgagcatcaggccaatttcatcaatggcgagctggcgaatttgctcgttcggactgtttaattcctgctgccagcggcgcacttcaaacgggctaagttgctgtgtggccagacttttgatcaccatgccgtgagtgacgtggttaatcaggtctttatccagcggccaggagagaaacagatgcatcggcagattaaaaatcgccatgctctgacaggttccggtatctgttagttggtgcggtgtacaggcccagaacagcgtgatatgaccctgattgatattcactttttcattgttgatcaggtattccacatcgccatcgaaaggcacattcacttcgacctgaccatgccagtggctggtgggcatgatatgcggtgcgcgaaactcaatctccatccgctggtattcgctatacaggctcagcgggctgcgggtctgtttttcgtcgctgctgcacataaacgtatctgtattcatggatggctctctttcctggaatatcagaattatggcaggagtgagggaggatgactgcgagtgggagcacggttttcaccctcttcccagaggggcgaggggactctccgagtatcatgaggccgaaaactctgcttttcaggtaatttattcccataaactcagatttactgctgcttcacgcaggatctgagtttatgggaatgctcaacctggaagccggaggttttctgcagattcgcctgccatgatgaagttattcaagcaagccaggagatctgcatgatgtctgcacccaaaattacatttatcggcgctggtagcacgattttcgttaaaaatattcttggtgatgtgttccatcgcgaggcgctgaaaacggcgcatattgccctgatggacattgaccccacccgcctggaagagagccatattgtggtgcgtaagctgatggatagtgcaggggccagcggcaaaatcacctgccacacccaacagaaagaagccttagaggatgccgattttgtcgtggtggcatttcagattggcggttatgaaccttgcacggtgactgatttcgaggtctgtaagcggcatggtctggaacaaaccattgccgatacgttggggccgggcggtattatgcgcgcgctacgtaccattccgcatctgtggcaaatttgcgaggacatgacggaagtctgccccgatgccaccatgctcaactatgttaacccaatggcgatgaatacctgggcgatgtatgcccgctatccgcatatcaaacaggtcgggctgtgccatagcgtgcagggaacggcggaagagttggcgcgtgacctcaatatcgacccagctacgctgcgttaccgttgcgcaggtatcaaccatatggcgttttacctggagctggagcgcaaaaccgccgacggcagttatgtgaatctctacccggaactgctggcggcttatgaagcagggcaggcaccgaagccgaatattcatggcaatactcgctgccagaatattgtgcgctacgaaatgttcaaaaagctgggctatttcgtcacggaaagcagtgaacattttgctgagtacacaccgtggtttattaagccaggtcgtgaggatttgattgagcgttataaagtaccgctggatgagtacccgaaacgctgcgtcgagcagctggcgaactggcataaagagctggaggagtataaaaaagcctcccggattgatattaaaccgagtcgggaatatgccagcacaatcatgaacgctatctggactggcgagccgagtgtgatttacggcaacgtccgtaacgatggtttgattgataacctgccacaaggatgttgcgtggaagtagcctgtctggttgatgctaatggcattcagccgaccaaagtcggtacgctacctagccatctggccgccctgatgcaaaccaacatcaacgtacagacgctgctgaccgaagctattcttacggaaaatcgcgaccgtgtttaccacgccgcgatgatggacccgcatactgccgccgtgctgggcattgacgaaatatatgctcttgttgacgacctgattgccgcccacggcgactggctgccaggctggttgcaccgttaaaacgcgactaaacgctactgcgccgggggatttattccggcgcacacctctgacgataccaataacagaaggcgggcgttggtaacagcgacccgataccctatgagcatttcaatgactacaaaactcagttatggatttggagcgttcgggaaggattttgcgatcggcattgtgtatatgtacctcatgtattactacaccgatgtcgtcgggctgtctgtgggtttggtcggtactttgtttctggtggcgaggatctgggatgctattaacgatccgattatgggatggattgtaaatgctacgcgaagccgatggggtaagttcaaaccctggatcctgatcggtacgttggcaaactctgtaatcttatttctcctctttagtgcgcatctgtttgaaggtactactcagattgtctttgtttgcgtgacctacatcctctggggcatgacttacaccattatggatattcccttctggagcctggttccaaccatcacgctcgataaacgtgagcgcgaacaactggttccttatccgcgtttttttgccagtctggcaggctttgttacggcaggtgtgacgctaccatttgttaattatgtcggcggtggcgatcggggatttggctttcagatgttcactctggtactgatcgccttttttattgttagtaccatcatcactctgcgcaatgtgcatgaagtctttagcagtgacaatcaaccgtctgctgaaggaagccatctgacacttaaagccatcgttgcgctaatttataaaaacgatcagcttagttgcctcttgggtatggctcttgcttataatgtagccagcaacattattaccggctttgctatctattatttcagttatgttatcggtgatgcggatttgttcccctattatctgagctatgcgggagctgctaacctggtgacgttagtattcttcccacgcttagttaaaagtttatcccgacgcattttatgggccggagcatctattcttccggtgttaagctgtggtgttctcctgttaatggcattaatgagctatcacaacgtcgtcctcattgtgattgcgggtattttgctgaatgtgggaacggcgcttttctgggtattacaggtcatcatggtggcagatatcgttgattacggtgaatataaactgcacgtacgctgtgaaagtatcgcttactccgtgcagactatggtggtgaagggcggtagtgcctttgcggcttttttcattgcggttgtgttagggatgattggctatgtaccgaatgttgaacagtctacgcaagccctattaggtatgcagtttattatgattgctctaccaactctgtttttcatggtaacgctgattctctacttccgtttctatcgcctcaatggtgacacgctgcgcaggatccagatccatctgctggataaatatcgcaaagtaccgcccgagcctgttcatgctgatattccggtcggtgcagtgagtgatgtgaaagcctgacgtggacaatagctaacgaaaatggcctgatgcgatatgtttatcaggccacgtcttaatgtaatgctttggatttgcaaattttgtagaccggataaggaattcacgccgcatccggcatcaacaaagcgcaagttgttatccggttatcaagccaaagcgccgtagctggcggcaatgaaagcgagcgaggaatatcaccgtcgttaatgcgccaagcagcgcgcagaacatatcggattgcgtgtcccactggtcgccctgggtgccgagaaaatcatccgctccctgacccattgccagcgctgcccaccactcgattaattcatacatcgcgcttatcgccagcgccacgcagcagaccaggaacgccaccattttacgtccgcgcacgtacatcccgcgaacgagaatttctcgtgccaccagtgcaggcaccagcccctggaaaaagtgccccagcttgtcatacggattacgactcaaccccagccattcctgcacctcaaaaccaacggggactttcgcgtaggtgtattgtccgccgaccatcaggatgatggcgtgaaggaaaatgagcgtatagagcagcggcgttaacggataacgtctggcggtggcaagcagtagctgcacgacaataatcaccggtgtcacttccatcagccaggtgagtttgtcatgggcgctaatgccggtataaatcaggattaacgttagcgtcagtgcgctggtgttaagaattaacggcttgagtgtgcgggtcatggtgagttcgcaaatcagggaaaatactgactattcaccagcaagcgtgaaattacaatcgcaaaagaggtggccagggggatcacctggcagcatgctgccaggcgctgggccgaagaggttacttagtgcagttcgcgcactgtttgttgacgatttgctggaagaagtcgttacctttgtcatcgaccaggataaacgccgggaaatcttctacttcgattttccagatagcttccatacccagctccggataagcgacgcactccagatgcttgatgctctgctgcgccagtaccgccgccggaccgccgatgctaccgaggtagaagccgccgtgtttatgacacgcgtcggtaacctgctgactgcggttacctttcgccagcatgatcatgctgccgccgtgggattgcagcagatccacgtaggagtccatacggcctgcggtggttgggccaagactaccacttggataaccggcaggggttttcgccggacccgcgtagtagatcgggtgatctttgatgtactgcggaagttctttaccggcgtcaatcagctctttcagcttggcgtgtgcaatatctcggcccacgataatggtgccggtgaggctcaaacgagtggataccgggtattggctaagctgggcgaggatctctttcatcgggcggttaaggtcaactttcaccgcttcgccttcaccggcctggcgcagttcttgtggaatgtactggcctgggttgtgttccagtttttcgatccagataccttcgcggttgattttcgctttaatgttacggtcagcggagcaggagacgcccatgccgaccgggcaggatgcgccgtgacgtggcagacggataacgcgaatgtcgtgcgcgaagtatttaccgccaaactgcgcgccaagaccgagtttctgggcctcttccagcagttcctgttccagctggacatcgcggaacgcctgaccatgttcgttcccttccgtcggcagttcatcgtaatagtgagcgcttgctaacttgacggttttcaggttggtttccgcagacgtaccgccaatcacaaacgcgatatggtacggcgggcaggctgcagtaccgagggtacgcattttctcgacgaggaagtttttcagtttgccgggagtcagcagggctttggtttcctggtagagatacgttttgttggcagagccgccgcctttcgcaacgcaaaggaatttgtactcatcgccatctaccgcgtacaggtcgatttgcgcaggcaggttagtgccggtgttgacctctttgtacatgtccagcgccgcattctgactatagcgcaggttatcttcgatataggtgttatagacgcctttgctcagcgtttcttcatcaccgccgccggtccacacgcgctggccttttttaccgacgatgatcgcggtgccggtatcctggcaggtcggcagcacgcctttggcggcgatttcggagtttcttaagaattgcagcgccacgtacttgtcgttttcgctggcttctggatcgtgaagaatagccgcaacctgtttctggtgtgccgggcggagcataaaagaagcgtcgtgaaaggcttgctgcgccagcagggtcagggcttctggttccactttcaggatggtttcgccgtcgaagtcggcaacgctaacgtaatcggaagtgagtagatagtattcggtattgtctttccccatcgggaaaggtgcctggtagataaagggtttgttactcatagcttccagcctgtaactctgtatttgttattcgaaaatggcgtgccgcgtagtcacgggcggcacgcaaagtgcatttataagaacccgtacatcgcggcgaagatccagccgaagacgcagcttacgctcacaccaatcaaccccggcagaataaagctgtggttgatgacgaagcgaccgatgtgggtggtgccggaacggtcaaactgaatcgctgccagatcgctcggataagtcggcaggatgtaataaccgtagcaagccggtgcactagccacgatgtatgccggatcaacgccgatcgccagcgcgaccggaacaatcgccgccagcgccgcagcctgagagtttacaaacttggaaaccagcagcagaacaatggcataggcccacggatactctttcaccatttcacccagtacgccctgaatttcagacatatgcgcaccgaacatggtttctgccatccatgcgataccgtacaccgccacgatggcgatcataccggaacggaagacttcgtttttactgatagacgcgggattggttttggtcaggataataatcagcgccccggtcagcagcataaacatctgaataaccagtaccatgctcagcggtttgccgccgaaggatggacgcaggtcgctatcagcaccaagaagggcgactacagcgattgccccgaggaaaatccacattgccagccagttgcttttcggcagttttttatccagcagcgtcgcggtatcaccgtaaacatactcacggttttccggtacggagatgaatttctggaactcttcgtctttatccagatctttaccgcggaaccagctgaagataccgatcgccaggataccgattaacgtgcttggaatggtgattgccagcagatcgaggaactcaagatggcgaccatcaaaggtgacattacccagcatcgcaaccagagacacgaccgcaacgctcaccggactggcgataatccccatctgtgcaccgatagaacttgccgccatcggacgttccggacggatgttgttcttaatggcgacgtcgtagatgatcggcagaatggtgtaaaccacatgacccgtaccgcaaagaatggtcagtgtacaggtcacaaacggcgcgacaatactgacatatttcgggttgcggcgcagcagcttctcggcaatttgcagcatgacatcaagaccgccgctagcttgcaaggtcgcgcttgccgccaccaccgcaatgataaccagcatgacatcaactggtggtttacctggctgaaggtggaagacgaagaccagaatgaccagaccgataccgcctaataaacccagcgcgataccaccctttctggcaccataaaacagacatatcagtattatgataagttggatagtaaataacatgtgtgaaccctcgcgataatcctatttaaatttttgctgaatagatcacagtcacgttctgttttgtatgaactgttttcagagcctgactaaatatccgtttggtcgttaccggctttagcaaatacctcacagtgaatattggctgattaaagcagcggcaaatttatgcactgtgataagcggctttttcagagagaaagactctctggcgatgggtttatagtttgtactgcgcagatgttaatgttttgtttgctgttatcttattgatatttatcggtctattttttgttctcagggcagatgtcattaggtttatagattaatctgatctacccatttgtgggtaaaaatacacataatgcgggtgacataatagttaattaacttttgttagcgttttgaaattaaaaacaccgttcacctgaagagatattaatttttagcgatgatggagggataattatatttgatctggcacaagttttactgatgaaggatgtaacttgtgccaggggtattttgcattacggtaataattattacttacagataaccagcgatccgttattggcaatattgtttcagtagactgtagtgttctgcctgaatacggtaacggtaaactggacgccccgtgacgccataatggatactggtgaacaagatgtggcagttgaccagccagatgaggtatttacggcaggaaacacggctaatgttaacctcgttggctagctcgtcggtactaaattcatagtcctgatgcgcgtcaatccactggcacagtgtgcgtaacgtctgcggcgttaagccttttggcaagcgacgaggatcctgttcgttggagctgctgccgtggattagctgatcaagctcggcctggtcataatactgatgtttttccagcgccattttcttttgccgccagccggtgagcgcctcttcaaagcgggaagcctggaagggtttgatcaggtaatccacgacaccgtaatgcaggctatctttaatggttgccgcatcggctgcggaggagatgacaatcacatcacttttgcaacgcgcgttatgcaggacaggcagtaaatcgagcccgttctctttttgcatatagatatcgagcaatatcaggtcgataggcgtatcgctattgaagataatctctttggctttctccagcgtgctggctgttccacagcattgaaagcctgggatttgtgctacgtatcggcgattcagctccgcgaccattgcgtcgtcatcgataattaatacattgatcatctgttgctcctctccccgtcccagggtatctggacaaaaaattgtgtgaaaatcccgggttcgctttccacggcgatgctgccgccgagattttctacctgttgtttgacaagtgctaaaccgacgcctcgctcgcttccttttgtgctgacacctttgtcaaaaatgtgatcgattttatcgggtgcgatccccggtccatcatcattaacttcacagtgcagccagccgtgacggtagtgcaatgttacgctaatttcgcctccgggttccggccctaatgcctccagcgcgttttctatcagatttcccaacgtggtaatcagcgtcgcgacctggtcctcactgccgctgtctggcagctggctttcactgtttaaaatcagcgtatggcctaaatcggtcgcgcggttaatcttgctgattaaaaaaccagcgataaccggagatttgatcttacccagcagagagccaatctcttcctgatagttattggctgttttgagaatgtaatcttccaactgcttataactcttcagatgcaataatccgagaatcacatgcaatttattcataaattcgtgggatcgttcacgaagtgcgtcagcatagttgaccagaccgtcgagtcgctgcatcagtttacgtacttcagttttgtccctgaaggtactaatggcaccgatgataacgccattactgcgcaccggaacggtgttgatcagtaatagccggtctttaatcgtaatctcttcgtcgcggcgcggggtaccgtcgcgtaacacttcgctgacatctaccacctgactccaactgtggcttagcgtgctcagtttctcatcgtcctggctcttacggtaattcagcaattcttgtgcggcatcgttgatcagcgtgacctcgccgcgatcgtccacggcaacgacgccttctttgatagactgcaacatggcctggcgttgctcaaacagcgtggagatttcgtagggttccaggccgaaaaggatttttttcagtaccttaaccagaatgcaggtgccaatcagtccgaccagcatgccaaataatacgctccagataatgctccagcgactgtcattgatctgttgggtcacacggcttaactcaaggccgatcgccaccacgccaatttgtttatgattttcatcgtagatgggggtaaatacgcgtaaagcctgcgccagaaaaccgcgattgatagcgacattttcttcgccattcagcgctttaaggatgtcatcacctttaaatggctgaccaatacgctgggcttcaggatggctgtagcgaagactttgcatatcggtaacgacaataaacagcagatcgttgcgtttgcgtacggcttccgcgatggcctggatgccactctcctgcggttttttctgcaagccctgacggatttccgggctgtcggcgagggtacgcgccactgccagtgccttgttggctagcccatctcgcgtcatatcactgatttggctgaagtaaatcagatgcaccaccaatagcacgctgaacagtaccgcactgaccattaagatcactgtggtactcaatttcatcggacgtttgcgtaacatgcggtagggcaaactatgtctcatcagcttccttgtgtgacaaatttcttaagcattatctctgatgaggcgggtaattcaaagggagtaagaatgattggctatataggggaagagactctggcaacggaaactgccagtgctgtatgaagattccggggctatgcttatagcgataatcatactgatgagagagggaaggtcatggatcaggcgctactggacgggggttatcgctgttataccggcgaaaagatcgatgtctatttcaacactgcgatatgtcagcattctggcaattgcgtacgtggcaacggcaagttatttaatctcaaacgaaagccgtggatcatgccggatgaagtcgacgtcgccactgtggttaaagtgattgatacgtgcccgagcggcgcgctgaaataccgtcataaataagcgagggtaaaatggaaatacgcgaaggccacaataaattttacattaatgacaaacaaggcaagcaaatcgctgaaattgtctttgtgccgaccggagagaatttagcgattatcgaacataccgatgtcgatgaaagcctgaaagggcaagggattggtaaacagctggttgcgaaagtcgtggaaaaaatgcgtcgggaaaaacgaaaaattatcccattatgcccatttgcgaaacatgaatttgataaaacgcgggagtatgatgatattcgcagttgatgggagagtacagagtcacgatatttttcattctctccgcgatgtgatgcaggagagcatctgaagggtagggggatgcacaaagaatgggcagagagcgcgtttttttgtcccaagtcatcccctttactgagcaaaaaaaagaatatctcctatatgagaatcatcaatcggggttaataagttttgcgtccccagagcgtttaatattgataggagtcatattatggaaggtaaaaacaagttcaatacttatgttgtttcttttgattatccaagttcttattccagtgtgttcttaagattaagaagtttgatgtatgatatgaatttctcctctatcgtggctgatgaatatgggataccacgacaattgaatgaaaactccttcgcaataacgacaagcttagccgcaagtgaaatcgaagatttaatcaggctcaaatgcttagacttaccggatattgattttgacctcaacattatgacagttgatgactatttccgtcagttttacaagtaaccaggaaggataagaagaacataaaaaatggcactattctctaaaatattaattttttatgtgattggtgtgaacatatcctttgtcattatctggtttatcagtcatgagaaaacacatattcgtttacttagtgcattcctggtcggaataacctggccaatgagtctgcctgtggcattacttttttctctcttttaagagctgtagttgagtggacccgctggttatcgtgaaacgaagcgtctctcctcaaaactggatttgcggaacgatgaacgaagcagtcgcctgactgcttcgttcattaaagtgaaatttatttctgtgggcgcatcgccgggaagagaataacgtcgcgaatagtatggctgttagtaaacagcataatcattcggtcgataccaatacccagaccagcggttggcggcagaccatattccagcgcagtcacgtaatcttcgtcatagaacatggcttcgtcgtcacctgcagctttagcattaacctgttcctggaaacgttcagcctgatcttctgcgtcgtttaattcgctaaaaccattaccgatttcacgaccaccgatgaagaattcaaaacggtcggtgatttccgggttaacatcattacggcgtgccagcggggacacttctgccggatattccgtaataaaggttggctgaatcagatgtgcttctgccacttcatcaaagatctctgtgacaatacgtcccaacccccagcttttctctaccgtaataccgatagattcagctaatgctttagcagcatcaaaattatccaggtcggccatatcggtttctggacgatattttttgattgcttcgcgcatggtgagtttttcaaacggtttgccgaaatcaaacacatgctcgccataagtgactttagtggtacccagaacctcttgtgccagggtgcggaacagactctctgtcagttcaatcaaatcgtggtaatccgcatacgccatgtagagttccatcattgtgaactcaggattatggcgaacagaaataccttcattacggaagttacggttgatttcgaatacccgttcaaaaccgcctacaaccagacgtttcagatacagctccggcgcgatacgcagatacatatctaaatccagagcattatgatgggtaataaacgggcgagcagatgccccacctggaattacctgcatcatcggggtttctacttccataaagccgcgcgcgaccatgaattgacggatagcggccagaattttactacggacaacaaacgtttgacgggatttatcgttagcgatgaggtccagataacgttgacgataacggacttcctgatcctgcagaccatggaatttatctggtaaaggacgtagtgctttagtcagcaggcgcagctcagtacagtgaatggaaagctcacccgtttgcgtcttaaacagcgtaccgcgggcaccgataatgtcacccagatcccattttttaaactgatcgttataaacaccttctggcaggctatctcttgcaacgtacagttgaatacggccaccgacatcctgcaacgttacaaaggaggctttccccatgatacgacgggtcatcattcggccagcaacgctgacttcaatgtttaaggattccagttcctggttatccttcgcatcaaactcttcgtgcaactggtcagaggtatggtcgcggcgaaaatcattgggaaacgccacaccttgctgacgtagtgccgccagtttttcgcggcgatttctcagttcatcgttaaaatcaatagcctcattggctccccgtgtttcttgttcagacattttggttcctctaaatccagctttcaatttagcgtagataaagagacagatcggtacactgtattatctgcctcgactattagtaactcagtttatcttatcgaaactaacgcttacctcaagttgatatcactaataaataaccatcaaaatggtttaaatgacttattaatctcgatttgttagtgttataaactaaaagttaatttattcataaccaattgtttttacgacagttaatcgttgctctcctgtatcatattcgtcggcgtgctaaacagaaaacgggtagcaaaggccaatacgacgatgatcgcgacacaagccaacgtccactctcccatctgagaaaagaatcgctggtaagctgcaattgccataccgctaatttggctctctgtcgtctgctgtgccacgacgcctgccagccagttggcgaccgcgcctgttgccagcatataaatcccggttaatacgccagacattttcagacgcgtgatttgcgcaatcgccaccgggtcaataaagagttcggcaaagcccattagcgccagcccggatatcatcacgcccatactcgcttgaccgtcagccgctgcatgtcgggcatcaaatgccaacaacataaagccacaagccatcagcagtaagccaaaggcaaacttcagccagacgcgcaatgtactgttgccgcggctttctgggctcgccagccaggccagtacaaccccagcgagcatcaccgcaattgcattcacgctctggaatagtgctgtaggtacttcaatattgaatgcctgacgattcacaaagcgatcgataaacaagctgatggtactgccgccctgttgtgccagtacccagaacaatgtcccgacaaacatcaacaatacaatttgccaaagagcacggcgatgttcggggaatttgatcatcatgcgggcaatgatttgtgcggcaatgaggcaaacgatcgccagcaaatatccggaccagtcgttctccagcagcagagtaaaaaatactggggctaaacagagcatcaccactaaccagctccatactggtaaggcaaatttgacactagtgagcgcttttttatccatactacgtgtggactggaaatgacgatgaccgcttaagaaaatcaacaaaccgataaacatgccgccacccgcaagggcaaagccaacatgccatccataccactgagcagccaggccgcaggcgattggggctgcgatagaaccgatattgcccgcagcatacagcaggctaaaaccgccatcacgtcgatgatcgttctcgtcgtagagctcgccaagcaaacagctgatgttacttttgaataaaccgtagccacaaataatgattgccagcgccagatacaggctaaaggtactatttgtatcaatacccagcaccacatggccaagggtcattaacagcgcgccggcaatcactgcagtgcggttgccgagcaggcggtcggcaagccagccgccgagaataggggtaacgtaaaccagagaagcatatgcgctgaacaggctgatggcatggttatcatcaaaaccaagctgatgggtgagatagagaatgagtaaggcacgcatgccgtaaaaactgaagtactcccagatttggatcgccacgatatagtatatcgcgcgcggctgactgggtgttttcatgtgttctccttatgagcaaaaaagggaagtggcaagccacttcccttgtacgagctaattattttttgctttcttctttcaataccttaacggtatagcggccatcagcctgacggtatgcaccgtgaatatcggtttcaaagcccggatagtgagcgccgatttcacacagcatctgcaggaactccagaaccggacgactttcttcggtgatcatttcacccggcattaccagaggaactcccggcgggtacggaaggatcatattggcgttaatacgacctaccatttcgtcgaggtaaacttcttcggtcataccgtgcagctctttctggaatgcagcatacggagtcattaccatcgtcggcagcacttcaaatgcgcgatacatcagatccggcagattgtggtgaacaatcagtttgtggatattctgagccagttcctgaatacgcatgttttcatagaattcaggatcttcacgatacagagacggcagcatgtttttcacacgcaggttcaggtcgaacgcacgtttaaagtcagtcagagcacgcagcaggctcagtgctttggtcttatcgataccgatgctgaacaggaacagcaggttatacggaccggttttctcaacaacgatgccatgttcgtcgaggtatttcgccacgatgctggccggaataccaaagtcgctcatggtgccgtctttttccatccccggagtcagcagggtgactttgatcgggtcaagatacatgtgctcgttatcgatgtttttgaagccgtgccaggtgctgtcagaacgcagcggccagcattcagtcgtatcgatatgatccggctgccatacatcaaagaaccagccatcagattccgttctcagacgtttgatctctttacggaatttgatcgcacgttcaatagaaccgttgatcagacgcttacctgcattgcctttcatcatcgccgcagcggtttcagtggacgccacgataccgtagtgcggagaagtggtggtgtgcatcatgtaggcttcgttaaaggtttcttcgtttacgtcacctttaacgtggatcatggaagcctgagagaacgccgccagcagtttgtgagtggactgggtttcgtaaatcactttcccttctacacggccaccgctcataccgcatttaccttcgtaaatcggactgaagttggtgtaaggcacccacgcggagtcaaagtggatggatttcacatccagtgttttcttgatgaagtcggtgttgtacagcagaccatcataggtagagttggtaattacagcatgtaccggccaggttgcgtttggtgtttctttcacgcgcttagcaatggtagcgtgctggaattcactctgtgggataccaccaagaataccgtaagcgttacgggtcgggcggaaatagattggcgtaacatcgctcatcatcatcaggtgggtcaggcttttgtggcagttacggtcaatcagaatggtgctgcctgctggagcagagtacataccaacaattttgttcgcagtggaagtaccgttggtcaccatgtagctgcggtctgcgttaaagacgcgagcgatatactgttctgcttctttgtgtggaccactgtgatccagcagagaacccagttcagatacactaatggaaatatcagatttcatggtattcggaccaaagaaatcatagaacaggctacctaccgggcttttctggaatgcagtaccgcccatgtgaccaggagtacagaaagtatatttaccttcacgaacatatttaaacagtgctttagtcagcggaggcagaatagtgttgatatattcgtcagtggtctgcttgatcttattagcaatatcttcagcagcacccagcgcatattcaaagaagctaatctgtaaacgcaggtcattcaggcttacatcgagagtggaatacgtattagcgaacgcgtacaacggcaggttctcgttcattttgctaatttcttcgcacagctcgagattatatttatcccagtcaaaaataacgccgcacagacgcgcattgttttcgatcagttttaataagtcgtcacggtcgttcgggtaaacaatctggaagttcagacgttcaagcgcgcgatgaagttcacggatgggttcttctttaaaataaacccccatgtgattcaatattgcaataacgttcatagtcatatctccaggtaaaaaaggcccctcccaacacatgggacaaaatgaaaggaggagcctcggaaaatacttttaattaatgtgcgttagacgcggtgtggttatccatactgtggctctggcgctcgtgcattttgcgagcgtagaacatcaggataatcaggctgacgatgaaggtacctgccagctcgaaggagcttgcgcccatcagcgcgatgaagcagaacacgcaacccagtacagagcagatcaggctgacaaagttgcggatgttaacgccttcaaaacgaatcaggtcaacgcaagagtagaaatacggcagcatagtcagcagtactgcgataccggtcagttcaccgaacaggtcagatgctttaccaccggcagagttcatcagagtgataaggatcatcagggcagtcattttcactgcagccagcagcagaccttttttcggaataccgttgctgtcgacttcaccataaactttcgggaagttaccgtcgttagcggcacgtacacctgcctggcctaccaacatcatccaggagcccagagaagtcaggcacgcaaaggcggtgaatgcagaaaccagcggcgcagcccagttaccgaggatagtactagcactgattgcaaacggagcaccggaagccgccattacagaagacggatacataccggaaagcacctgagtcgcagcgatgtaaacaatacctgctaaaccagtacccagcatggttgccagcggaacggtacgtttcgggtttttaaccataccagtacttacagctgcggattcaacacccacgaaggcccacaggcagagcagaatacttttaatgatcgcatgaccatcagtggtatccgcagtattccagttagctgcataagttgccgcatcaaaccaatgccagccaacaatagcagtcatcaccacaggaataagaaccagcaccagaccaatagtggttaaacggcttacccaagtaccgccgagcatatttacaaaggtaaatacccagacgatagcaatacaggcgatacccgccggaacaggatcatttaatactgggaagaaggtggaaagataagatacagcggtaataccaatcgccaggttaccaatccagttagcatggtaataaagaacacctgtctgaaaaccaaatgcaggggaaatttctccggcataagcaattgggccaccttgttgcgggttttttgttgccagtcgggcatatacatacgccaggctcattgcaccaataatagagataatccaaccccagatagcaataccaccgatacttgctaggttcgcaggtaataatgcaataccgctccccatcatattaccggcaacaacaccggtacaggcaaatagcccgatcttcttggcagaactcatgctcttctcctaatttcatttttgaatttggagtccgggtcatgatgtataactatttcctgaccagaccaaactggcgataagattactcacgaaaaaaggattaatcctaaagattaggtgaaataacacaaaagtttctgtaagtgagaacttgaggttttttattaacacatcaggatcgcaagttgatatcatgaaaagataaacatttaatgtttacaatggattgcgtgacattctctggttaaatttatgtaataaaaattatgcggcaaataaattgccgcaacatattataccaacaggaacatacaaaaactcaacaacaaatatttccgagcataaatcaacccggagttacttattcactagcaagaaatttgtcgagataaggtacaacataaggaacagaagtctggaatataccattttcaatccagtaaagggtgtttgcccctgggcgtaaattaaaggcggtgagatatgcatcagctgcttcccggttcatccccttcatttcataaaccttgccaagcaacacataatttagccaggacatttcaagatcaatgccagtatttatcgcctggtaagactcatctgttttaccttttaccagagcactgaccgcttttatttgatatataatggacaggttgttcaattccggcagtgtaacaatgttatctatttctgtgttcagtgctgctaattgtttttcatctaaaggatgttgagaatggcgcacgatatcaactaatgctttttctgctctcgcgtaggtaaattctggggaactttgaacaatctcacctaataattcactggcacggttcaaacttttatcatcgccatgcagtaaataatcatgtgcctgataaaaattagttaataacgcaccacgatgcggcaaaattttctggagcgtctcctgcattcgttgtggccacggttggtttaacgctttacttaaactctccagtaaatcattttgaatcgccagctgattaccgttagtgatgacataacgtttatccagcatggtactaccatctgcattgtctaccaattttatgctcataaagcattgttgagcacggtattggcgctgattaacaaacgcaatagataatgttttaccggaactgctcggttcatcaatgttgtagttgattttgtcatgcaccataaaggtggagaaggtgttaagacttgtcgccaccaaatcacccacgcctatcgcgtaagagagctgatacggggaactccagctgttacaacttttatttaccatattaatgtcaatatcgcgtggattgagcaaaatacggcttttgctcataggaagacgtgtatcaagactactaaacgctaccagtgctacacagatacctaagctcaacaggaaaaaaaaccatacccaaaaggtagtgaatcgtttgcttttaactggggattgttcaggtggcgttgcggtgttttgaatgttaagactgtgggagggagaatctgtggcaggaaccgcctctggtatagggggagggctagatagcattatttcctctccctcttcttcgctgtaccagataaccggcaccattaatttatagccgcgctttggtacagtagcgatatagacaggactatcttcatcattatcttttaaactcttacgtagttcactgatactctgcgtcacaacgtgattggtgacaatacttctcttccagacattatcgataagttcatccctgctaagtacttcgccactgtgttgagcaaagaaaaccagaagatcgattaatctcggctcaagggtaagttgacgcccattgcggctaatttggtttatggacggagtaacaagccattcgccaacgcgaactacaggttgttgcataatagaaactcattcgaaaagggaatgatgcaatgataattgccacaacctatttttaccatctatagatgggtttatttacatattattggtgaatgcaagacgttatttttaccagccataaacttcttgattacatagtattacgaaaggattttactgagaaccagaagtaatattccttaccatcaaaattcatcatctttgccaaagaaaaatgttcagaaaataatccatggaaaattgtccggagcacttactattttaatggattgttagtctttgcatgagcaagcgaactgatacatttctctttgttctcattcagaaaatctcatcagtcgccgttcagaccggtgttgtgctttatggatgcgttacgctcctgatgacgtcatttgacgttcaacagcatcacggggccgcacgacatttcacgtcagttagtgctatagctcaggaacaaattttcccgaattgggatatgcccgcaaattgctggtgatgtggggagaatctggttgagttcggtagaattgatttggaggcagaacgcttaaatcgtggcgtcctgaaacgaaaaacggacctccgtggaggtccgtttatatgaatttggtgcccggactcggaatcgaaccaaggacacggggattttcaatcccctgctctaccgactgagctatccgggcaacggggcgcattaaaccgtaatctgcacatctcgtcaacctaatttcagtaaaagcgattcaactgcttaagattgcggcaaatcgcttcttttctgtgtttctgtcaggtcaatgcaccaccctggcggcagcgggcgaagcgcaggatatcttccgccagccgatgtgcagtgtcgacatccgcctggctacgattcaccagcattcggcttaaacagccttccagcaccagttccatctgctttgctaccatcgccggatcgtcaacttccagtgtggttaacagttcgtgggtgaaatcgtaggccgcgcttttttgctgatcggccagttgatgaatagggtggccaggatcgggataaaacgtacaggcagcgataaatagacagcccggatagcggttgtttttaacgcactcgcttaacgcctgataacgtgccagcagcttttgttcggcggtttgcgtttcgtccagcatcagctgacgacgccagacatctatctgttggctaagataacgcagcgcatcgtagaggattgcctctttgtctggccagaagcggcgtagctcgtccagtggataatccacacgttcagcaaccatctccagcgtggtgttggcaatcccttgtaattctaataatttcagggcttctcccagtacatcttcacgttgcacgctattttcctccgtctttcccactgcaagtgtcgttcacggttggcgatcgcgcaaatgtgcgctgaaggtttcagcatccataaagcccgtgacgcgtgcttgtggatgctcctggccttgtccgtcaaaaaagagaattgtcggtaggccaaggacattaagatgctttaacagcgccacatcttgtgcgtcgttggccgtgacgttggcctgaagtaagaccgtgtctgctaacgctttttgcacctgcgggtcgctgaaggtgtatttctcaaactctttacaggcgacgcaccagtcggcataaagatctaacatcaccggtttgcctttggcttcaacgagcgcctgatttaactcatctaccgttttgatttgtgtaaagttgagatgcgtctgagtttgcgcggtatgcgtcgcaccaaatgcccaatcctgaagtgggcgcacgctaaccaatgccgctgccagcagaataatttgcacaatacgcatccagccgcgtttagcctgtaggctggtgataaaggcccagccaaagaatgcgacacccagcgcgctccacaagcgtaatccccatacatcaccaatcactcgctccagcaggaagaccggcagtgcgaggatcacaaaaccaaacgcggttttgacttgttccatccacgggccgcttttcggcagcaagcggttaccaaagacggtaattagcatcagcggcaggcccatgcccaacgcatagagataaagcgtgccgccgcccagccacatgttcccgctttgggcgatatacagcagaatcgcgctaagcggtgcggtggtgcatggactacagatcagtccggcaatcgcccccataacaaacacaccgccaggactgccgccctgttggcgattgctcatcaacgtgagacgtgtttgcaggctagaggggagttgcagggtaaacaagccaaacatactcatcgccagcaaggtaaagacgatggcgaggccaatgagcacgtatgggtgctgtagcgccgcctggaactgtaaccctgcggcggcaaccaccagacccagcgccgtgtaggtcagcgccatcccctgcacataaataaaggtcagcaacaatgctctggcagtggagagccgctgtttaccacccagcacgatgccagaaatcagtgggtacattggcagcacgcatggcgtaaaggcgataccaataccgatcaacaacgcccagagcgcggaaaagggcaattgcgcggtgggctgctcttgctgcggaacagacacaggctgtggcgctgcgttgttggcgaccacttcgcttaacggaacggttttggtttctggcggataacagaaaccggcatcagcacagccctggtaggtgacagttaacgtcgctcccgcactcgcctggttgatggtgacgggaagcgtcagccgatcgcggtaaatctcgcttttgccgtaaaactcatcttcatgccagacgccttgcggcagctgcacgtcggcaattttcgcgtgttccggcgtaatgcggatctgtttacggtagaggtagtaaccgtctttgatctgccaggtcagattaaggtcatgttggttttgctgaaaatcaaaagcaaaggcttgatccgcggggacaaattgactacgtcccggcgcgtcgaataatccggcaaaaacggaagtgctgcaaagtagcaggatcagcgtaaagatgcgttgagccatgagaggtaatctgtgtctccttatgtcagcgtaaagatgcgttgagccaactgaggtaatctgtgtctccgtgtgtaacaggtaaaaccagaagttccggggtttgatatggatgatgagacttcaggcattccagcagtgcctgctggtgagatacggtagtttttaaaatcatctgcacttcgtattcttgctccagcttaccttcccagtaatagagagaggtagcgccggggatcaaggtcgcgcaggccgccagtttttccgccagcactttggcggctaaatcctgggctgtcgcttcatctggtgccgtacatagcaccacgacagacgcggtattgctacttttttcatcaagcataaacacctcgcaagaacagatggaaccgcaagagagaggtcactatacaacggacgggggaaggatgttagtcggcgggaaagaaagcggggcgtgaacgccccgcgattgatcattacagcatgaagctacccagcacgaagccgaagcaaacggccagggcaacacccagagtacccgggatgaagaacggatggttgaagacgaatttaccgatacgggtagtacccgtgtcatccatctgtaccgcagcaaccagcgtcgggtaggtcggcagaatgaacagaccagacaccgcagcgaaagaagcaacagcggtcagcggactaacgttcagtgccagagccatcggcatcagtgcttttgcggttgcagcctgagagtacagcagagcagaagcaaagaagaagatgacggccagcagccacggatgaccctgaatcacttcaccagcggtatctttgatccagtcgatgttgttggaaacgaaagtatcgcccagccacgcaacacccaggatacaaatacaggcgctcatacctgctttgaaggtgctggagttgaggatgttgtcggtatcgactttacagataacggtggtcagagttgcaacgctgagcatgatgatcaggattgcgttggtggtgttcatcagcggtttttcaaccagacccatgcttgggctgttgatgattgcatagataaccacgccaactacgcccagcaggaacagccagacggacgtttttgcaccggatttgatttcaatctgcttttcaccgcgcagttcaaccaggccctcttccagacgcttgcgataaatcggatcgtcagagagtttggagttgaacagcatagtgaccaggaaggacatcaccagaaccgccagcagggtggacgggatgaccacggagagcagatggaggtagctgatgccatgaccttccatcacggaagacatgtaaaccactgccgcactgattgggcttgcggtgatcgcaatctgcgcggataccactgcagtagacagcggacggcaaggtttaacgccttgttccttcgcaacttcagcgataactggcagtgtcgccagagagatgttgccagtaccagcaaagatagtcaggaaataggtcacgatcggtgcgaggatcgtgatgtatttcgggttacggcgcagcagcttttctgtctgatgaaccagatagtccagaccgccagcaacctgcatggcagaaatagcggcgataaccgccatgataatggagatgacatcgaacgggatgttaccgggtttaacgccaatagcggcaagaaccagcacccccaatccgcctgcaaaaccaatacctattccccccaatctggcgcccaagaagatcgccagcaaaactatgatgagttctacaactagcatattagccttccttgttttttaacaagttgatattagattgttatttttaagttactgctcacaagaaaaaaggcacgtcatctgacgtgccttttttatttgtactaccctgtacgattactgttcgctttcatcagtatagcgttttgctttgtaagccgggtgcatcagattctgtacggagaaaatatcgtcaagttccgcttcagtcaacagaccgcgttccagaacgacttcacgtacactcttaccggtttcggcacagattttacccacgatgtcaccgttgtggtgaccgatgaacgggttcaggtaagtaacgataccgatagagttgtaaacgtaaccttcgcacacttctttgttagcagtgatgccgttaatgcatttttccagcaggttgtagcaagcgttggtcagaatgtgaacggattcgaacatggcctggccaatgaccggctccataacgttcaactgcagctgacctgcttctgctgccatggtaacagtggtgtcgttaccgatgactttgaagcatacctggttaaccacttccggaacaaccgggtttactttagctggcatgatggaagagcccgcctgcagttccggcaggttgatctcgttcaggccggcacgtgggccactagagagcaagcgcaggtcgttacagattttggacatcttcacagccaggcgtttcagcgcgccgtgaaccataacataagcgccgcagtcagaggtcgcttcgatcaggtcttcagccggtacgcatgggaagccagtaacttcagccagttttttcactgccagcggagagtactctttcggcgtgttcagaccagtaccgattgctgttgcaccaaggttaacttccagcagcagttcagcggtacgttggatgtttttcacttcttctttcagcaggatgctgaaagcgcggaattcctgaccgagggtcatcggtactgcgtcctgcagctgggtacgacccattttcaggatgtcctggaattcgacagctttacgttcaaagccttcacgcagttggttaatcgcatctaccagcttaatcagggaagagtaaactgcgatacggaaaccggtcgggtaggcgtcgttagtggactgacatttgttaacatggtcgttcgggttcaggtactgatattcacctttttggtgacccatcagttccagaccgatattggccagcacttcgttggtgttcatgtttacggaagtacctgcgccgccctggtagacgtctaccgggaactgatccatgcattttccgttgttcaggacttcatcacatgcggcaatggtggcattcgctacacttttaggaatggtttgcagctctttgtttgccatagctgcggcttttttaaccattaccataccgcgaacaaattcaggaatatcactgattttgttgttgctgatatagaagttttcaatcgctctcagagtgtgaacaccatagtaggcatcagctggaacttccctggtacccaacagatcttcttcgatacgaatgttgttactcatgtgaaccttctttttcaagctgccaatgatttgctttaaacacacagaatatatgtggtttcgaatgtttttcgaccgacgattatcccctgcatcgaccgaatacccgagatcatatgctgcttgaggatttctaccgtaatctggatcactttaagtgtcggtttttaccccttaattattaatttgtgaaatagatcaccgctttgggattactaccaaaaatagttgcgcaaacatcttgaaattttgctaatgaccacaatataagctaaacgcgattcgcaacccattcaggtagccggggttaaccggctgctattacaggagaaacctttgcgctggttaccttttattgccattttcctttatgtctatattgagattagtatctttattcaggttgcccatgtattgggggtattgctgaccctcgtgctggttatattcacgagtgttatcggtatgagtctggtacgtaaccagggctttaagaatttcgtgctgatgcagcaaaaaatggcggcgggtgaaaacccagcggcggagatgattaaaagtgttagcctgatcattgctggtttgctgcttttattaccgggcttttttaccgacttcctcggtcttctacttttattgccgccggtgcaaaagcatctgacagtgaagttgatgccgcatttgcgcttttctcgcatgcctggcggcggttttagcgccgggaccggtggcggtaatacttttgatggtgagtaccagcgaaaggatgatgagcgcgaccgccttgatcataaagacgatcgccaggattaatgtcgaaacgccggattatgtggttatgccattttccggcgtttttcgttttggcagcaacagccataaccccgccagcatgatcagcgcatagagacttttccagccgaccattgccagtaacagaacgcataacagcccgccaaccaccgccagtagtcgataacgtccttgcaataatttacagcctgccagcatgcataacagataaatcataataaagatgccattggcataaataataagagcgtccagattgatctctaaagcatgaatcaccaaagtgctcaccacacagcagccgagcaccgcattgagggcattattcgggatatggcgagaagagaggcgtgccaggtagtggtcaggattatgttgcgcctggctccagaccaggcgggcgaagctctgtatataaatgttgagactggcaaagcaggccagatagccaatcacgcaggcaatccataacgctcctacaccgaacaactgcactacaatttttggaaggcttgctgccgccgccattttttcaccataggcgtcgaagtgtaagacgactaccgtacagccccagtagactaatcctgccagcagcagaccaatcatcaaagcacgaggaaaatcacgctctggatttttaaattcgctggcgagatgggcaaatgcctccagaccgacaaaacaccagaacatcacacttaacgcagcaaataacccggtaagttcgatattaccaggtgccggaaaggggatattcgcaggtttgatatcgcccgcccaccagatagcgacaatcagcgcgacgataagtccggcaataacggtttgtagattagcactggaactggcaccgcgagtaccgatataccacaccagcgccagcgtaccgagttctgccaacaacagttgccagctatgccagccaaacatcgcctggccgaacccggcggcaatttgtagtgcggcaggcaaacccacgggaatgacgcttaaaaacagccagccggtgactcgctcaagccggctaccaaacgccataccgacgaagtgcgcgacgccgcctgcgctgggatagtggcgacccagaatcgcaaacacaatcgcaatcgggaacactaagataatcaaaacgggccacgcccacaggctgttattgcccgctaccagcgcagctaacgcaggaacggcaaacacgccagtgcctaataaactcgtgcttagcaggccaatgccctgggccagccccagttcttgtttgagtccactcatgggttgatgtccgattgcgcccaaattttgggcaactgcgtagattttcgatggtagcacaatcagattcgcttatgacggcgatgaagaaattgcgatgaaatgtgaggtgaatcagggttttcacccgattttgtgctgatcagaattttttttctttttcccccttgaaggggcgaagcctcatccccatttctctggtcaccagccgggaaaccacgtaagctccggcgtcacccataacagatacggactttctcaaaggagagttatcaatgaatattcgtccattgcatgatcgcgtgatcgtcaagcgtaaagaagttgaaactaaatctgctggcggcatcgttctgaccggctctgcagcggctaaatccacccgcggcgaagtgctggctgtcggcaatggccgtatccttgaaaatggcgaagtgaagccgctggatgtgaaagttggcgacatcgttattttcaacgatggctacggtgtgaaatctgagaagatcgacaatgaagaagtgttgatcatgtccgaaagcgacattctggcaattgttgaagcgtaatccgcgcacgacactgaacatacgaatttaaggaataaagataatggcagctaaagacgtaaaattcggtaacgacgctcgtgtgaaaatgctgcgcggcgtaaacgtactggcagatgcagtgaaagttaccctcggtccaaaaggccgtaacgtagttctggataaatctttcggtgcaccgaccatcaccaaagatggtgtttccgttgctcgtgaaatcgaactggaagacaagttcgaaaatatgggtgcgcagatggtgaaagaagttgcctctaaagcaaacgacgctgcaggcgacggtaccaccactgcaaccgtactggctcaggctatcatcactgaaggtctgaaagctgttgctgcgggcatgaacccgatggacctgaaacgtggtatcgacaaagcggttaccgctgcagttgaagaactgaaagcgctgtccgtaccatgctctgactctaaagcgattgctcaggttggtaccatctccgctaactccgacgaaaccgtaggtaaactgatcgctgaagcgatggacaaagtcggtaaagaaggcgttatcaccgttgaagacggtaccggtctgcaggacgaactggacgtggttgaaggtatgcagttcgaccgtggctacctgtctccttacttcatcaacaagccggaaactggcgcagtagaactggaaagcccgttcatcctgctggctgacaagaaaatctccaacatccgcgaaatgctgccggttctggaagctgttgccaaagcaggcaaaccgctgctgatcatcgctgaagatgtagaaggcgaagcgctggcaactctggttgttaacaccatgcgtggcatcgtgaaagtcgctgcggttaaagcaccgggcttcggcgatcgtcgtaaagctatgctgcaggatatcgcaaccctgactggcggtaccgtgatctctgaagagatcggtatggagctggaaaaagcaaccctggaagacctgggtcaggctaaacgtgttgtgatcaacaaagacaccaccactatcatcgatggcgtgggtgaagaagctgcaatccagggccgtgttgctcagatccgtcagcagattgaagaagcaacttctgactacgaccgtgaaaaactgcaggaacgcgtagcgaaactggcaggcggcgttgcagttatcaaagtgggtgctgctaccgaagttgaaatgaaagagaaaaaagcacgcgttgaagatgccctgcacgcgacccgtgctgcggtagaagaaggcgtggttgctggtggtggtgttgcgctgatccgcgtagcgtctaaactggctgacctgcgtggtcagaacgaagaccagaacgtgggtatcaaagttgcactgcgtgcaatggaagctccgctgcgtcagatcgtattgaactgcggcgaagaaccgtctgttgttgctaacaccgttaaaggcggcgacggcaactacggttacaacgcagcaaccgaagaatacggcaacatgatcgacatgggtatcctggatccaaccaaagtaactcgttctgctctgcagtacgcagcttctgtggctggcctgatgatcaccaccgaatgcatggttaccgacctgccgaaaaacgatgcagctgacttaggcgctgctggcggtatgggcggcatgggtggcatgggcggcatgatgtaattgccctgcacctcgcagaaataaacaaacccccgggcagaaatgtctgggggtttttcttttggtcatctttctagtataagattcagacacggacgacgcgagtggcgtccagctcattgattatggggaataacatgcacgtaaaatacttagcagggattgtcggtgccgcgctactgatggcgggttgtagctccagcaacgaattgagtgctgccggtcagagtgtacgcattgtggacgagcagccaggcgcagagtgccagctgattggtactgcgacaggtaagcaaagcaactggctttccgggcaacacggagaagaaggcggttctatgcgcggcgcagcaaacgatctgcgcaaccaggcggctgcaatgggcggtaacgtgatttatggcatcagtagcccgagccagggaatgttgtccagttttgtcccgacggatagccagattatcggtcaggtttataagtgcccgaactgatgtgatccagaggctgggtgacaaacgtataattgcctgatgcgcttcgcttatcaggcctacataaggcattgcaactgattgaatgcttgagaatttgtaggccggataaggcgtttacgccgcatccggcatgaccaacgatcacgttatcagtcatttcaggctggatggctccagcctcgcattagcaaagatgagattatttcgcctgtggtgcagttttgctggtggattgaacacgtaagtgatgcagcgcgcgtaagcattgatcctgggttagcggttgggcgttattcgccgctacggtgcgaacatagacctgacatggcacacccgcgagttttttcagtcgtgggctgaaatcaagcattcggcgagtgatcgcttctatttctttacccggcgttgcttcacgcgttttcaccactgcgccgctaaattgttctttgccactttcatctttaaagcggtaaagcaccgccagataatggtcgaacaagttatgtttccattccggttgggaataggtgtcatattccagattgccattgtcctggcagtcaacgtcgtataacggcaggaaatctaacagactggtaatacgtaatgccagttcacgcatttccgcattattaattgcatgaatgattgctcgcgccagcatttcaatctgcaactcattgacgactaactcacatttgctaccgtcatgtagcgttaatacgaaggtaagattttcgccttgattatcggtaagttccagcgtgttaacccgacgattaatatcggcatttttaagctcatcaaccagaatttctgggatgttttctgccattttcttaatgactttatcgcgagcttgctcatactgaaggtgtgcagcagcatccagtttatgcttttgatgcagacgactttccagcgcaatcagcaggtcgcgcagttccatgacagacataaagaacaagctttctttattgcgaggttctttaattttcagcgccagtgcaatgaaattattactcttgcgaataacaccggtattaacacccttgatgcttatggccatgtaggttctccctaaccatttctcaattaaataattaattttaatttataagccagataaatgggcttggtagtaatagttgttaaaataacataaatagccgtactcactctatataaacagaaaagaaaggttaattattggtgttagctatataaaaagtaacaacagcaatgcatatgaataattaaaggttatgcaacgggcaaagattaaacttcccagtttaatgacaggttgctgtacttgcgtttgttgctcttgccggatgcagcgtaaacgccttatccggcctacagttcattgcaaatccattcaatttcaatgcacgatgtaggcctgataagcgtagcgaatcaggcaattttaatgtttaacttccctgtttaatcagttactgctggcgtagctggagatccagcggcgttttgctgggttcgccgccaatttctcgcgccagtttcggcaccagatatccgctcaccagtgtcagcaactcacgcataatctgccgtgcttcgtcatcactcaccataaaatgcgccgcgccctgtactttatcgagcacatgcaggtaatacggcattacgccggcatcgaacaacgcattactcaggtttgccagcgtttgtgcgttatcgttcacatcacgtaacagaacgctctggttcagcaaagtaacgcctacccggcgcaacttagccatcgcctgacggaatgtttcatctacctcattggcatggttgatgtgattcaccagcaagatttgcagcgtagaacgggcaaagcattcaaccagcgcctcggtgatacgtgccgggatcacaatcggcagacggctgtgaatccgcagacgttttatatgcgggatggcttccagttgtgtgagcaaccagtccagctcgtgatctttcgccatcagcggatcgccgccggagaaaatcatctcgtccagttccggatgcgcagcaacatactcaagtgcagtttgccagttacgcttgttgccctgattttcggcataggggaagtgacgacggaagcaatagcggcaatttaccgcgcagccgcctttgaccagcaaaagcgcccggttgtggtatttatgcaacaaaccaggcactacgctgtgctgttcttccagtgggtcggtggagaatccgggcgcgatgacaaactcatcttggctggtaagtacctgacgcaaaagaggatcgtccggattgcctttctccatgcgatcgataaaactgcggggcacacgcagggcaaaaagctttttggcgctgcgtccggctaacagtttttcctccgcgtctatattcaaaagacgcagaagttcatcaggatcggtcacaacatcggcaagttgcgttaaccaatcttctctggatggggtatttagggttacaatatgcgccattttgtggcttagctaccaattaacaaatttcagagggccttatggcaacgtactatagcaacgattttcgtgctggtcttaaaatcatgttagacggcgaaccttacgcggttgaagcgagtgaattcgtaaaaccgggtaaaggccaggcatttgctcgcgttaaactgcgtcgtctgctgaccggtactcgcgtagaaaaaaccttcaaatctactgattccgctgaaggcgctgatgttgtcgatatgaacctgacttacctgtacaacgacggtgagttctggcacttcatgaacaacgaaactttcgagcagctgtctgctgatgcaaaagcaattggtgacaacgctaaatggctgctggatcaggcagagtgtatcgtaactctgtggaatggtcagccgatctccgttactccgccgaacttcgttgaactggaaatcgttgataccgatccgggcctgaaaggtgataccgcaggtactggtggcaaaccggctaccctgtctactggcgctgtggttaaagttccgctgtttgtacaaatcggcgaagtcatcaaagtggatacccgctctggtgaatacgtctctcgcgtgaagtaatgcggttgtggtgcggcctgcaggctgcaccatcacttattcaggtcagagatgatgaaacgccttatcgttcttgttttgcttgccagcacgctgctcacgggctgtaacaccgctcgcggtttcggcgaagacatcaaacatctcggcaactccatctctcgcgctgccagctaatttttcttctcttccgaaaaatcatcagattcccatcatttttggcgatgttgtctattattaatttgctataggcaaacataaataacattacctaaaaggaagacgttatggtgaagaagacaattgcagcgatcttttctgttctggtgcttagtacagtattaactgcctgcaacaccacgcgtggcgttggtgaagacatttctgatggcggtaacgcgatttctggcgcagcaacgaaagcgcagcaataagcaataacggtacgacagctgtgtcgtgccgtttgttttttctgcgatagtcacaaaggtaatagttgaaattcccctgccacctggcaaaatatccgttcaaccatcagctttgcaggacgacctgcaaacgcctcttttcaccggggacggccccaattctccggagcctgatatgtcctggattatcttagttattgctggtctgctggaagtggtatgggccgttggcctgaaatatacccacggctttagtcgtttgacgccgagtgttattactgtgacggcgatgattgtcagtatggcgctacttgcctgggcgatgaaaagcttaccagtagggacggcttatgccgtgtggacgggtattggcgcagtcggcgcggccataaccggcattgtgctgctcggtgagtccgctaacccgatgcgcctggcgagtctggcgttaatcgtattggggattattggtctgaaactcagcactcattaactaccaggctgctgtacccaaataaatttactgacatcaaacccttcccgggtcgcgactgccagcatctcctgtttcacttcgtcagaaatggttggcgtgcgggagagtatccacaggtagtcgcggtccgggccgcaaaccagcgcatggcggtattcccgatcgagtgcaataacgttataaccgccatagaaaggaccaaagaaactcactttcagcgcagcgcgagttggtgcgccggtaaagtacgctttcccttcactctgctgccacattcctctgtcagggttatagcctttattaatgacattcaggccgccgtcatcacgcaggctgtatgttgcggtgactttttccagtccacgttcaaagcggtgatcaaaacgggcaatctcataccaggtaccgagataacgtttggcgtcgaaattatttactacggtcacgccacgcggcggcgtaggagaactgcaggcaacgaccagaaatgcagctgtcgctgcggcaacgagagggagcaggcgcataaatgtttccttactggtttttttctaagtgtagatgacagcaaggaaaagcggagaaaaggtccgaaaattcggacccgatggaattttactgtagagcgttaagaatctgccaggcggcgtcgactctcgctggattgggatagtttttgtttgccagcatcacgatacccagctctttttctggaataaacgcgacatagctaccaaatccgccggtcgcccctgttttatgtacccaacttgcgcgtactgcaggagttgggggcgtaatcgcttttacggggcgtgctgccagtgcaattttattgtcactgccgttaatgatgctgtcaggatttaccggccagtccagcatttcccagcccaggccctgatacatatcgccggtttgccagtagcgagattgtgccagttgtatcccttgttgaagcgttttctcattgatatcaaggggttttaaattgctttgcacccagcgggccatatcttcaatggtgctcttcacaccataagcttcagcatctaacgccccagggctaacatgcactgccttaccttcgcgatatccccaggcgtaattcttttcttctgcgggcggtacattaatccacgtatggttgagtttgagtggctggaagacacgagtttgcatcgcctgctcaaaactcaaaccagacggcttcacagccagtgcgccgaacaaaccgatactggagttggcatacagacgttgtgttcctggagcccatgcaggctgccagttttgatagaagcgcagcaagtcgctactggatttcacctcatccggcacctgcaatggcaggccgccagcagtgtaggttgcgagatgtaatagtgtgatcccattccactgtttagcggtaagttcaggccagtattttgttgtgggatcgcttaacttgatttcccctcgagcaatagcgtcgccaccaagcacgccagtaaatgttttgctgacgctacctaactcaaacaacgtttgctgtgtgacgggctgctttttggcgatgtccgcatagccccaggtaaagtaataaggtttaccctgataaattaccgccaccgccatacccgggatcttttgttgctctataagcggggtaattgtgcgatgcacaatatcgttgatttgttgaggggcagcaaatgtggagcaagaggcggtaattaataaggcgcagagcgtcgttttgaacatagggtctggtttccatacaaaacggcccgccataggcgggccggatttacattggcgatgcgttagattgtaacgacaccaatcagcgtgacaactgtcaggatagcagccagaccgtagaaaacccatttgcccgcaggtacgtggattttcagatcgtgcatcgcgtggtgcatacggtgtaaaccacaccacagcggcagaacgatcatcaggaacaggaatacgcgaccaatgaagctctgcgcgaacgccagaacgcgctcgtagctcagcgcatcacccggaaacaaccccagtggcagcagaatacccaccagcaggatcatcaccggcgcaatgatggcgctccacataccaccggccccgaagaggccccagaataccggttcgtcagaacgctttggatttggattaatcatctcaggctccttaccagtacagggcaacaaacaggattacgatggtggcaaccacagttaccgcccagagacttttgataattggctctggtcccattttttcgtcttttacaatgatattggccgctttcggtgccagttcaaaccaggttttggtgtgcagcagagctgccgccagagtgatcaggttaatgatcacgataaccgggttttgtaaaaagtcgacgaatcccgcccaggcttccgggccatttttcagggcaaacagcccgaaaatcagttcaatgctgaaccacacagccggaaccgccgtgccttcgcgcagcatgtaaaagcgataaaacggcaattttttccaccaggtggacgtcattggccgtacatacggtttacgtttagtcgtcatgttgcactccttagcgtggtttcagggtcgcgataagaaagtctttgctactttctactttgccctgctgaatggccgcagccggatcgacgtgtttcgggcagacttcggagcagtagcccacgaaagtacagctccatacgccgttctggctgttcaactgcgccatacgctccttcttaccgtggtcgcggctatcttcgttataacgatgcgccagcgtaatggcagccggaccgatgaactctgggttcaggccaaactgcgggcacgcggcgtagcacaaaccacagttgatgcaaccggagaactggtgatacttcgccatctgcgccggggtctggatgttagtaccctgatccgcggtgcgggagttgccgatgatgtacggtttgatcgcttccagactttcgatgaagtgggtcatatcgaccaccagatcgcgttcaatcgggaagttagctaacgcttcaaccttcataccgtcggtgtaatcacgcaggaaggttttacatgccagttttggcacgttgttaaccatcatgccgcaggaaccacaaatcgccatacggcaggaccagcggtagctcaggtccggtgccaggttgtctttgatgtagcccagcgcatccagtaaactggtagttgcgtcataaggcacttcatagaatgcgctatgcggtgcggtatcgacttccgggttatagcgcaccacctcaattttcaggtttttcatctcagccattcgccttctccttcttattggctgcttccgccttatcggctgcatccgcttcgccaccgtaaacgcgtttagctggcggcagcgtagtaatcttcacgtcgctgtactccaggcgagtcgtgccatcagcatcgcggaaggcgagggtgtgtttgaggaagttgacgtcgtcacgctcggtgcaaccttcgtccagacgctggtgcgcgccgcgggactctttacgtgccattgcggagtgcgccatacattcagcaacgttcagaccgtggcccagttcaatggtgtagagcaggtcggtgttgaacacgctggaagtgtcggtgatgcgcacgcgcttgaagcgttcctgcagctctgccagcttgtcgatggttttctgcatcagttccggcgtacggtagataccgcagccttcttccatagccaggcccatttcgtcgcggatcttcgcccagttttcgccgccatcctggttaaccagatctttcagacgttgttcaacgccagctgcctgcgcttcaattgccgcttcgttgccattaccggcagttgctgcacgctctgtcgcttgttcaccggccagacggccgaagaccaccagttccgccagggagttagaacccagacggtttgcaccgtgcagaccaacagaggaacattcacccacggcgaacagacctttaatgcgggtttcacagttctgatcggtttcgataccgcccatggtgtagtgtgcggtcggacgtaccggaatcggttctttaaccggatcgacgccaacgtacgctttcgccagttcgcagatgaacggcagacgttcatgcagttttttctcgccgaggtgacgcaagtcgagataaaccacatcgccacgcggcgtggagatggtgttgcctttacgccattcgtgccagaaggcctgagagactttgtcgcgtggacccagttccatatatttgtttttcggctcgcccagcggagtttccgggcccatgccgtaatcttgcagataacggtagccatttttgttgaccagaataccgccttcaccgcggcaaccttcggtcatcaggataccggaacctggcagaccggttgggtgatactgaacgaattccatgtcacgcagcggaacgccgtggcttagcgccatacccataccgtcaccggtaacgatgccgccgttggtgttgtaacgataaacgcgacccgcaccgccagtagccataacgaccgcgttagcacggatctgcaccagcgtgccttccatcatgttcattgctaccaggccgcgaacatgaccatcatcaaccagaatatccagcacgaaatgttcgtcaaaacgctggatctgcgggaattgcagagaggtctggaacagcgtgtgcagcatatggaagccggtcttatcggcggcgaaccaggtgcgctcgattttcatgccgccgaagcgacgtacgttgacgctaccatccgggcgacggctccatgggcatccccacagttccagttgggtcatttcggttgggcagtggtggacgaaataatccacgacatcctgctcacacaaccagtcgccacccgctactgtatcgtgaaagtgatattcgaagctgtcatgatcctgcgcgacagcggcggagcccccttctgcagcaacggtatggctacgcatcgggtatactttactgattagtgcgatttttgcattcggatttgcctgcgcggcagcaattgcagcacgtaatcccgcgccaccggcgcctacaatggcaagatcggcttgaaaggtttgcacgacattcctccagattgtttttatcccacagccacgtacttcagggtaagtacctgaaagttacggtctgcgaacgctattccactgctcctttataggtacaacagtatagtctgatggataagtctgaaatttgacgagatcgatttttttagtgcgcaagagggctaaattatcactgaagatgattaatttaattactaaaccatcagatcgtgctttttttagtcactgcccaccgctgtttgattcctgcgtaaaatttgtctcgccgtcgcgttgcgagtagacttcgtgcccttgtcaaaaactggagatttaactatgagcgaaacggcatcctggcagccgagcgcatccattcctaacttattaaaacgcgcggcgattatggcggagatccgtcgtttctttgccgatcgtggagtgctggaggtggagacgccttgtatgagccaggcgacggtaaccgatattcatttggtcccgtttgagacacgtttcgttggccccgggcatagccaggggatgaatctctggttaatgaccagcccggaataccatatgaaacgcctgctggttgccggttgtgggccggtattccagctgtgccgcagcttccgtaatgaagagatggggcgttatcacaaccctgagttcactatgctggagtggtatcgaccgcactatgatatgtaccggttgatgaacgaggtggacgatctcttacaacaggtgctggactgcccggcagcagaaagcctttcttatcaacaagctttcttgcgttatctggaaattgacccgctctctgccgacaaaacgcaactgcgggaagtcgcagcgaaactggatttgagcaatgttgctgataccgaagaagaccgcgacacgctgctacaattgctgtttacctttggcgtagagccaaatattggcaaagaaaaaccgacctttgtgtaccactttccagccagccaggcaagtctggcgcaaatcagtaccgaagatcatcgggtcgctgaacgctttgaggtttattataaaggtattgagctggcgaatggtttccatgaattgacggatgcccgtgagcagcaacaacgctttgaacaagataaccgtaagcgcgcggcgcgcggtttgccgcagcaccccattgaccagaatctgattgaagccttgaaagtcggtatgcctgactgttccggcgtggcattaggtgttgatcgtctggtgatgttggcgctgggcgcggagacactggctgaagtcatcgcctttagcgttgaccgggcataattctgaaaaattactgaattaacagcgaagaatggcgtgataagcgccattctgtagcatatgttttcatttttccgttaaaggccacaatttaagactggatatttgatatcatccaggtatcaattctgtattggtttttacgctgcctgctcaatgttgcgcagtgcagttcagtgggcacgtgttatacacgcgctgaaatgaaggatggtttcatgcctcacacgataaaaaagatgagtctgataggactcatattgatgatctttacttccgtatttggatttgccaatagcccaagcgcttattacttaatgggttatagtgcgattcccttttatatattttctgcattgttattctttattccattcgccttaatgatggctgaaatgggagctgcttatcgcaaagaagaaggcggtatctattcctggatgaataatagtgtcggaccacgttttgccttcattggtacgtttatgtggttttcctcttatatcatctggatggtgagtacctccgcgaaagtttgggtaccgttcagtacattcctctatggtagcgacatgacccagcactggcgtattgccggactggagcctacgcaggtggttggtctgctggctgtggcatggatgattctggtcaccgtcgttgcttctaaggggattaataaaattgcccgcattactgcggtgggcggtattgcagtaatgtgtctgaatttagtattgctgttagtaagcattactattttgttattaaatggtgggcatttcgcgcaggatattaatttccttgcaagtccgaacccgggttatcagtccggtctggcaatgctaagctttgtggtatttgccatttttgcctatggcggaattgaagcggttggtggtctggtcgataaaacggaaaatccagaaaagaactttgccaaaggtattgtttttgccgctattgttattagtatcggttatagcctggcaatatttttatggggcgtcagcacaaactggcagcaggtattaagtaatggttccgttaacctcggcaatattacctatgtgctgatgaagagccttgggatgacgctgggtaatgcactgcatttgagtcctgaagcgagtttgagcctgggcgtatggtttgcgcgtattactggacttagcatgttcctcgcctataccggtgcgttctttacgctttgctatagtccgttgaaagccatcatccaggggacgccgaaagcattgtggccggaaccgatgacgcgcctgaatgcgatggggatgccgtctatcgccatgtggatgcagtgcgggttggttactgtcttcatcctgctggttagctttggtggcggtaccgcaagcgcgttctttaacaagctgacgctgatggcgaacgtgtctatgacgcttccttacctgttcctcgcgctggctttcccgttctttaaagcacgtcaggatctcgacagaccgtttgtgattttcaaaacgcatttgagcgcaatgattgcgacagtggttgtcgtactggtggtgacatttgcgaacgtcttcaccatcattcaacctgtggttgaagccggagactgggacagcacattgtggatgattggcggccctgtcttcttcagcctgttagcgatggcgatttaccagaactattgcagcagagtggcaaaaaatccgcagtgggcggtggaataacccgatgccctatcgtctacctgacgatagggcgtaaagacaggaaatgttatggatgacaccagccgggacccggcaataaccgaagatgaaatcagggcgctgcaattttctgccggggatgtagcggaaatagagcagacgattctctcttttgtcgatgcctgccacacccgtaaagtggcgatggtggtgggtagcaccattaacaccctcaaagatcgcgatggtaaacggtggggaaacctgccggatatttattgcgcttatcttatccgatgtctggtttttcgcggggaattagtgggatacggcgatttgtttcgtatgcgctatagcgaaattaagcgaccggttaccttatgagtgcgcgcatgtttgtcttatgctgcatctggtttattgtggcgttcctctggataaccatcacttccgcgctggacaaagagtggatgattgatggacgcgggattaacaacgtctgcgatgtgttgatgtatctcgaagaagacgatacccgtgatgttggtgtgataatgacgttaccgctctttttcccttttctctggttcgctttgtggcgaaaaaaacgcggctggtttatgtacgccaccgcgctggctattttcggctactggctgtggcagttttttctgcgctatcagttttgtttgtgagccggattggttcatccggcacacaaacttacaaacttcccgcctgacgacctttgcccgcagacgtcagcgttctccccgtttgtttaccgttgaggctttccagacgcatctggaagggcgggaatggcatatcgataccgtgggcatggaagccagccagaatcagctggtggatctcatggcgtagcggcatacggtgacccatctcagcggcgtaaatacgcagctcgaaaatctgaatcccctgttgcagatccaccaggaagacttccggtgccgggttgtcgatcaccaggctgcagcgacgcgctgcggtgagcaggatttccgtcacttcttcgctattggcatcggcaggggccggtatcgtcaacaccacgcgcgtgacgctgtcagagaggctccagttgataaactgctcggtaataaacgccttgttcggcacgattatctctttacggtcccagtcgctgatggtggtggcgcgggtgttaattttcgtcacgctaccggtgagatcgcgaattgtcaccgtatcgccaatgcgaatcggtttttcgaacaggataatcagaccagagataaagttggcgaaaatttcctgcaaaccaaaaccgagaccaacaccgagcgcggcaaccagccactgcaatttgctccactcaataccaatcatactgaagccgaccagcccgccaatcagcatcagcagatatttggtgatggtggtgatggcgtaacccgtacccggcgttaaatccaggtgctgcaaaatcgccagttccagcagcgcgggcaagttgcgcaccagctgcgtggtgatgataaacaccagaatggcaatcagcaccgcaccgagggtaattggctccagactttctacgccctgtaccgtggaggtgacatcccacaggctaatattttcgaggaagccgaaagcggaatggatttcactccacagcacaatgacagaaagcagggcgatcaacatcaaaatactgcgcaccagccgcaaggattgcgcactgatggcatcgagatcgacttcgctttcatcgacttcaattgctccttccgggctactgtgatgatgcgcttcctcttcgccacgcgcacgttgcgctaacatctctgcccggcgatgcttcgcccgatcaaacgccagcctgcggcgctggatcagcatccagcggcggataacgtgataaaccaccagtagcaggaaccagatggcaacgctggtttcaagcctcgctaacagcgcctgtgccgttgccagataacccaccgcgctcgccagaatggcaaccaacggcgcgccaatcatcatgttccacagcatatggttggtaatgttgtcgccgctgccctctttgttgagatacagcggaatcccggcctttttcaggctgagggtgaccaccgccagcgcaccgcaaatgaggataaagcaaagccgtcccaggctaccggagaattcacggtcgtcgaggttatcgaacatcatcagcgccataatcagcggcacaataagcccgatgctcatcaggtagtagcgcatcccacgggaaacacgttcgcgcggccagccaaaatgagcgataaacaagccgttcgggcgggcaaaggtggcgcaaatcatcactacccacagcagcggcacggtggccgttacaccatcgccaatcgcgaccgccagcggataaggccacgcctcgcgcaagccgtaacccagcgtcatccacagcaccggtaacggactcgcgacgagaatgctccagaaaagagtgcgcaacgtcagccagaagtgatcctgagtcactttgccaactttcgccgcgctacgttcaagaaaacgggtgaaatagcggcggctgtaaatactgcaaccgaccagaatcaacgcgccaaacagcggcaaaattgtctctttgctggtcagcatcatcacactggctttgcccaactgactgaaggtgtccaggctaatgagacgacgcagatcctgggcgatttccagcggccaggcgatggtcatcgggcgcacgtcagaggtccagaacagatagcggtgcgttgcttcgttcacctctttcagcgcatcctccagttgcccgttggagactttcagcttggtcagttccaatagtagcgtgtcgccaccctgcaacaaactgttcagcaactcacgctgagtgcgcagttgtgcttccagaatacggttttgctcggcagtcagcggctgaccgtcggcctgatgaatttgccgtagcagcggctgtttattaagcagatcctcataacgtaaccgttgcacacgcaactgcgccatttcggtatcaagctgttgtggtttcggcatttccggcagccgtgccacctgcgcccgcagcgcttcgccgagcagattggagcttcccagccattggctctgttcacgcagcgtattcaacgcctgccggacctgtaacgtctggctggcagcctgacgctgttggctggcaacgagatccatccgctgcgcctgttgattcaaagccgcgcttagttcgcggttaattttgaattgcgcgacgatatctttcggcaaatcggcgctgttttctgccagcaattcggtactttccagcgcccgctccgcctcaagctgacgttggctgtttaattgattacgcaaggcctgcaaatacgcatccagttgctggctctctttttccgccagctcactgcgtaagcgcgctaattcctggcggttattggcagacagctgcgccagctccagttcatcaacgagcgccttaagacgtgcagagtcagactgcaacgcgaaattttgtgcctgattgagcggagtattgccggtaagcgttcccaggcggcgctcgatctcatttaactgacggcgggcgtcggtttgctgttgcggcagttgattcaggctatcggcaatctcgcgggcgcgctcctgctcttgctgggcctgacggcttttatccagcaactggctgctgacctggagaatttcctgattcagcgcgtcggtagacattcccgggctcacgctgcgcggctcgtcacgcatgttgtttaattgtgcgcgcagagtagcggagagtttcggataattatcgataacttgctgatattgtttgatgcgctcaagggaaccttttcgttcctcaagcgcatttaaggcagactggagcgcctctacgacttccggctgtgcgggtttcgccgcttttgcctgctccagttcctgagtgatttgtttgctatcgggggccgtcgcggcgtacgccccccaactgaggcaccaggccatcagaaaagtgataatcaggcgcacgtcagcgtttcctttgatggattagacctggtcttttttgtcgtcaaccaatgggctggcgtcgtgttctgcttcgatctcttcagcaggaagcggggcaggttcagcgtctggcgtaacaaaggtttcggtagatactgccagcggctggccaattttcgtgacagacaggctttccagttgctcaaccagattcactttacccggtgcaaacaggttgataacggtggaaccgagtttaaagcgacccatttcctggcctttcagcagtgccacagaaccgtcgttttccccggcaggccaggtccagcgcttgatgataccttcgcgcggcggcgtaatggtgcccgcccagaccgtctcaatgctgccaacaatcgtcgctccgaccagaatctgcgccattgggccaaattcggtatcgaaaaggcaaatcacgcgttcgttacgggcaaacagattcggcacgttctgagccgtgagatggttaacggagaagagatcgcccggcacgtagatcatctcacgcagaataccgttgcacggcatgtgtacgcggtggtagtcacgcggggagaggtaagtggtcacaaacgtaccgttgcggaacaggtccgccatcagatagttgcctgccagcagggcttcgaggctgtagttgtggcctttggcttgcaggattttatcttcttcgattttacccaactggctgataacgccatcggcaggcatgaccagtacattcggatcggtatcgattgggcgtacttcgtcacgcagcggacggacaaagaattcgttaaaggtgcggtagctggcggtgtccggcttttgcgcctctttcatgtcgaccttgtagtatttaacgaacagatcgataaccagttttgtcagccatcctgcccgcttgcttgcgccccaacccgccaggcgagtaagccatagtttcggcagaatgtactgtaggctaagtttaaaactatttaacaaggtagcctccaggccattgttttgtcgttcctgatccggcctacatgccggatcctgaaaaaaaggggacgattctaacgacggttagcttaattgtcagtcatccgtatcagaaaagtttttacgcgtttttacctgcgccatgctttccagaatacggtgatagttttcgaaacgggtttccgcgattttcccttcctcaaccgcttcccggatagcgcagcccggatcggtatcgtgtttgcaatcgcgatatttacacagacctaaatagtcatggaattcgacaaagccctgagtgatttgttccggctccaggtgccagaggccgaactcacgcactcctggggagtcaatcacatcaccgccgtgcgggaagtgatacagccgagcggcggtcgtggtgtgctgaccgagcccgctgttgtcagagatatcgttggtcaggatctctttttgcagccccagcaacgcattcagcaggctggatttgccgacgccagactgcccggcaaaaatgctgatgcgcccggtcaacgcctcttccagcggttttagcccatcctgagtatggctggaaaccatcaatacgcgataaccgatattgcggtagatatccatctgctcgttgacgaacgccatgccttcgtcgtccagcaggtctatcttgttgagcacaataatcggctcaatctgcaaggtttcgcaggccaccaggtaacggtcgataatattgaggctcagctccggcaaaatggcggagacaatgacaatctggtcgatgttggcggcaataggttttacgccgtcgtagaaatccggacgcgtcaacacgctggtacgctcatgcaccgcttccacgatccctttgacatttacgccttccgccgccggtttacccggacgccagactacgcggtcgccggttaccaggctacggatggtacggcgaatattgcagcggtgaacgtcgccatcggcggattccacatcagcgtgcataccaaagcggctgatgacgataccttcatcaggctcgccaaacagattgtcgtcgtagtcgggcttctccttagacgttttaagacgacgctggtgattggcgttcacgcggcgctgctggcctttggagagtttatttttactcaatcgtacagactcctggtcgcccctgatgggcaaaacatctatgatacacgcaattgtggatcaatatagtcactgtgaatgggtggaaaatagcatgagtgccaatgaaaacaacctgatttggatcgatcttgagatgaccggtctggatcccgagcgcgatcgcattattgagattgccacgctggtgaccgatgccaacctgaatattctggcagaagggccgaccattgcagtacaccagtctgatgaacagctggcgctgatggatgactggaacgtgcgcacccataccgccagcgggctggtagagcgcgtgaaagcgagcacgatgggcgatcgggaagctgaactggcaacgctcgaatttttaaaacagtgggtgcctgcgggaaaaagcccgatttgcggtaacagcatcggtcaggaccgtcgtttcctgtttaaatacatgccggagctggaagcctacttccactaccgttatctcgatgtcagcaccctgaaagagctggcgcgccgctggaagccggaaattctggatggttttaccaagcaggggacgcatcaggcgatggatgatatccgtgaaagcgtggcggagctggcttactaccgcgagcattttatcaagctgtaaaatttttcctggtcacgtaagcgccggaatccacttgcggcggcgtgattttgacgctaaattgaacgtcttgctgataatttcagcacttgagataaaaacgcaaaaaaaacttttttggggggttgcagagggaaagatttctcgtataatgcgcctcccgtaacgacgcagaaatgcgaaaattacgaaagcaaaattaagtagtacgcgggaatagctcagttggtagagcacgaccttgccaaggtcggggtcgcgagttcgagtctcgtttcccgctccaaaatttgaaaagtgctgcaaagcacagaccacccaagcgggaatagctcagttggtagagcacgaccttgccaaggtcggggtcgcgagttcgagtctcgtttcccgctccaaaatttgaaagtgctgtaaggcacagaccacccaagcgggaatagctcagttggtagagcacgaccttgccaaggtcggggtcgcgagttcgagtctcgtttcccgctccaaattcttctctcaataaaatatccacagcgacgcgatgcgttattgctggtttttgttgtctctgacaaactcttgtaaacagagttatccacagcctcaggctgtaatcttaatttcaaagaaacttcgcacggtgaatagtatttttttaacctattgatagataagttaaaaattaagattccgttttgtcgagtcgatcacttgacgattttattcgtcttgaattgcaatgcgtttttatttttattcacaagctgtggatgaatcaggcgtcacgcggtaaccctttttcaatcacccgaaccagacgctgttttttcggcaattgcacttcgactatgcacgcatttcgtctctctatttgctgcgcaatcgcccacgctatgtgctcatcgagaagtgggtgctcacctttacgactttccagcgctgtcaaaatcgtttcatcccaaggggcattgcctaatgctacggcgatattacgcagccaacgcaggtgaccaatacgacgaatcgcgcttccttccgtgacttttaaaaacttctcttcgctccaggcgaataactcaatgagttccggtgcgtgtagcggcttacgcgggctgaaatcctcttctgtggtgagttgactatagcgattccacgggcagataagctggcagtcatcgcaaccgtaaatacggtttcccattaacggtcgcaactcttccgggatcgccccttcaagttcgatggtgagataagagatacagcggcgagcatcgacggtatatggctcgacgatggcaccggtcgggcaaatcgtcatacaggccacgcatttgccgcatccttcctcgactggttgatccacgggcagcggaatatcgaccagcaattcgcctaaaaagaagaagctaccggcctcgcgattgaggataagactgtgcttacctgtccagccgagcccagctttttcagctaacgggcgctcgagaataggcgcagaatcgacaaacggtctaaaattcaggctaacacaatgttgctgaatcatctcgcccagctttttgagtcggttgcgcagaagtttgtgatagtcacggcccagcgcataacggctaacatagccgagtttggggtttttcagcgtgctggcaaatgcggcgttagcaggaaggtaattcatccgcacgctgatcacgcgcagcgtaccgggcaataactcatgagggcgagcgcgcagcataccgtgacgtgccatccagtccatttcgccgtggtattgtttgtccagccatgcttgcagtttgggctcggactcgctgagatcggtatcggtaatacctacctgctgaaagcccagttccagcccccactgtttaattttttgcgctaactgattgagatcgaggggctcactcatgacggaccatacaatgaagaaaaaccccgtaagtataccacacaccgtctggtacgccgacgatatccgccgcggagaacgcgaggcggcagatgtgctggggctcacactctatgagctgatgcttcgcgctggcgaggccgcattccaggtgtgtcgtagcgcgtatcctgacgcccgccactggctggtgctgtgcggtcatggtaataacggcggcgatggctacgtggtcgcgcgactggccaaagcggtcggcattgaggtcacgttgttggcccaggagagcgacaaaccgttgccggaagaggccgcgctggcacgcgaagcatggttaaacgcgggtggcgagatccatgctagcaatattgtctggcccgaaagcgtagatctgattgttgatgcgctgctcggtaccggtttgcggcaagcgccccgcgaatccattagccagttaatcgaccacgctaattcccatcctgcgccgattgtggcggttgatatcccttccggcctgctggctgaaactggcgctacgccaggcgcggtgatcaacgccgatcacaccatcacttttattgcgctgaaaccaggcttgctcactggaaaagcgcgggatgttaccggacaactgcattttgacagtctggggctggatagttggctggcaggtcaggagacgaaaattcagcggtttagtgcagaacaactttctcactggctaaaaccgcgtcgcccgactagccataaaggcgatcacgggcggctggtaattatcggtggcgatcacggcacggcgggggctattcgtatgacgggggaagcggcgctgcgtgctggtgctggtttagtccgagtactgacccgcagtgaaaacattgcgccgctgctgactgcacgaccggaattgatggtgcatgaactgacgatggactctcttaccgaaagcctggaatgggccgatgtggtggtgattggtcccggtctgggccagcaagagtgggggaaaaaagcactgcaaaaagttgagaattttcgcaaaccgatgttgtgggatgccgatgcattgaacctgctggcaatcaatcccgataagcgtcacaatcgcgtgatcacgccgcatcctggcgaggccgcacggttgttaggctgttccgtcgctgaaattgaaagtgaccgcttacattacgccaaacgtctggtacaacgttatggcggcgtagcggtgctgaaaggtgccggaaccgtggtcgccgcccatcctgacgctttaggcattattgatgccggaaatgcaggcatggcgagcggcggcatgggcgatgtgctctctggtattattggcgcattgcttgggcaaaaactgagcccgtatgatgcagcctgtgcaggctgtgtcgcgcacggtgcggcagctgacgtactggcggcgcgttttggaacgcgcgggatgctggcaaccgatctcttttccacgctacagcgtattgttaacccggaagtgactgataaaaaccatgatgaaagcagtaattccgctccctgaataaggaagtgactgataaaaaccatgatgaatcgagtaattccgctccctgatgagcaggcaacattagacctgggcgagcgggtagcgaaagcctgcgatggcgcaaccgtaatctatctgtatggcgatttaggcgcaggtaaaaccacctttagccggggctttttacaggctctgggtcatcagggtaatgtcaaaagccccacttatacgctggtcgaaccctatacgctcgacaacttaatggtctatcactttgatttgtaccgccttgccgatcccgaggagctggagtttatggggatccgcgattattttgccaacgatgccatctgcctggtggagtggccacaacaaggtacaggtgttcttcctgacccggatgtcgaaatacacattgattatcaggcacaaggccgtgaggcgcgcgtgagtgcggtttcctctgcgggtgaattgttgctggcgcgtttagccggttaacctttgaaaggtggcgggatgatgtatcgcatcagaaattggttggtagcgacgctgctgctgctgtgcacgccggtgggtgccgcgacgctctctgatattcaggtttctaacggtaatcaacaggcgcggataacgttgagttttattggcgatcctgattatgcgtttagccatcaaagcaaacgcaccgtggcgctcgatatcaaacaaacgggcgtgattcagggactgccgttgttgttcagcggcaataatctggtgaaggcgattcgctctggaacgcctaaagatgcacaaacgctacggctggtggtcgatcttaccgaaaacggtaaaaccgaagcggtgaagcggcagaatggcagcaattacactgtcgtctttacgattaacgccgatgtgccgccaccgcctcctccgccgcccgtggttgcgaaacgcgttgaaacgcctgcggttgtcgcaccgcgcgtcagcgaaccggcgcgcaatccgtttaaaacggaaagtaaccgcactacgggtgttatcagcagtaatacggtaacgcgtccggcagcgcgcgcgacggctaacactggcgataaaattatcatcgctattgatgccggacacggcggtcaggaccctggcgctatcggccccggtggtacgcgggagaaaaatgtcaccatcgccatcgcgcgtaaattgcgtactttgctcaatgacgatccgatgtttaaaggcgttttaacccgtgacggggattactttatcagcgtgatggggcgcagtgatgtggcacgtaagcaaaacgccaatttcctcgtgagcattcacgctgatgccgcaccgaaccgcagtgcgactggcgcttccgtatgggtgctctctaaccgtcgcgccaacagtgaaatggccagctggctggagcagcacgagaaacagagcgagctgctgggtggggcgggtgatgtgctggcgaacagtcagtctgacccctatttaagccaggcggtgctggatttacagttcggtcattcccagcgggtagggtatgatgtagcgaccagtatgatcagtcagttgcaacgcattggcgaaatacataaacgtcgaccagaacacgccagccttggcgttctgcgcagcccggatatcccaagtgtactggtcgaaaccggttttatcagcaacaacagcgaagaacgtttgctggcgagcgacgattaccaacaacagctggcagaagccatttacaaaggcctgcgcaattacttccttgcgcatccgatgcaatctgcgccgcagggtgcaacggcacaaactgccagtacggtgacgacgccagatcgcacgctgccaaactaaggacgattgatgccaattcaggtcttaccgccacaactggcgaaccagattgccgcaggtgaggtggtcgagcgacctgcgagcgtagtcaaagaactagtggaaaacagcctcgatgcaggtgcgacgcgtatcgatattgatatcgaacgcggtggggcgaaacttatccgcattcgtgataacggctgcggtatcaaaaaagatgagctggcgctggcgctggctcgtcatgccaccagtaaaatcgcctctctggacgatctcgaagccattatcagcctgggctttcgcggtgaggcgctggcgagtatcagtagcgtttcccgcctgacgctcactagtcgcaccgcagaacagcaggaagcctggcaggcctatgccgaagggcgcgatatgaacgtgacggtaaaaccggcggcgcatcctgtggggacgacgctggaggtgctggatctgttctacaacaccccggcgcggcgcaaattcctgcgcaccgagaaaaccgaatttaaccacattgatgagatcatccgccgcattgcgctggcgcgtttcgacgtcacgatcaacctgagccataacggtaaaattgtgcgtcagtaccgcgcagtgccggaaggcgggcaaaaagaacggcgcttaggcgcgatttgcggcaccgcttttcttgaacaagcgctggcgattgaatggcaacacggcgatctcacgctacgcggctgggtggccgatccaaatcacaccacgcccgcactggcagaaattcagtattgctacgtgaacggtcgcatgatgcgcgatcgcctgatcaatcacgcgatccgccaggcctgcgaagacaaactgggggccgatcagcaaccggcatttgtgttgtatctggagatcgacccacatcaggtggacgtcaacgtgcaccccgccaaacacgaagtgcgtttccatcagagccgtctggtgcatgattttatctatcagggcgtgctgagcgtgctacaacagcaactggaaacgccgctaccgctggacgatgaaccccaacctgcaccgcgttccattccggaaaaccgcgtggcggcggggcgcaatcactttgcagaaccggcagctcgtgagccggtagctccgcgctacactcctgcgccagcaagtggcagtcgtccggctgccccctggccgaatgcgcagccaggctaccagaaacagcaaggtgaagtgtatcgccagcttttgcaaacgcccgcgccgatgcaaaaattaaaagcgccggaaccgcaggaacctgcacttgcggcgaacagtcagagttttggtcgggtactgactatcgtccattccgactgtgcgttgctggagcgcgacggcaacattagtcttttatccttgccagtggcagaacgttggctgcgtcaggcacaattgacgccgggtgaagcgcccgtttgcgcccagccgctgctgattccgttgcggctaaaagtttctgccgaagaaaaaagcgcattagaaaaagcgcagtctgccctggcggaattgggtattgatttccagagtgatgcacagcatgtgaccatcagggcagtgcctttacccttacgccaacaaaatttacaaatcttgattcctgaactgataggctacctggcgaagcagtccgtattcgaacctggcaatattgcgcagtggattgcacgaaatctgatgagcgaacatgcgcagtggagtatggcacaggccataaccctgctggcggacgtggaacggttatgtccgcaacttgtgaaaacgccgccgggtggtctgttacaatctgttgatttacatccggcgataaaagccctgaaagatgagtgatatcagtaaggcgagcctgcctaaggcgatttttttgatggggccgacggcctccggtaaaacggcgttagccattgagctgcgtaaaattttaccagtagagttgataagcgttgattctgcccttatttacaaagggatggatatcgggacggcgaagccgaacgctgaagagttactcgccgcgccgcaccgattgctggatattcgcgatccgagccaggcttacagcgctgctgattttcgccgcgatgcgctggcggaaatggccgatatcaccgcggcggggcggatcccactgttagtgggcggtacgatgttgtatttcaaggcattgctggaagggttgagcccgctaccgagcgcagacccggaagtacgggccagaattgagcaacaggcggcagagcaaggttgggagagtttgcatcgtcaacttcaggaggtagatccggttgcggcagcaaggattcatccaaatgatccacaaaggctttcccgggcactggaagtttttttcattagcggtaaaactttaacggaactgacgcaaacgagtggagacgctctaccgtatcaggtgcatcagttcgccatcgccccggcgagccgtgaactgctccatcaacgcattgagcagcgttttcatcagatgttggctagtggttttgaagcagaagtccgggcgctttttgcccgaggagatttgcatacggacttgccttccattcgttgcgtgggttatcgccagatgtggtcttaccttgaaggcgaaatcagttacgatgaaatggtttatcgaggtgtttgcgccacgagacagttggcgaagcggcagataacctggctgcgtggttgggaaggggttcactggcttgacagtgaaaaaccagaacaggcgcgtgacgaagtattacaggttgttggtgctatcgcaggctgaatgtgtacaattgagacgtatcgtgcgcaattttttcagaatcgaaaggttcaaagtacaaataagcatataaggaaaagagagaatggctaaggggcaatctttacaagatccgttcctgaacgcactgcgtcgggaacgtgttccagtttctatttatttggtgaatggtattaagctgcaagggcaaatcgagtcttttgatcagttcgtgatcctgttgaaaaacacggtcagccagatggtttacaagcacgcgatttctactgttgtcccgtctcgcccggtttctcatcacagtaacaacgccggtggcggtaccagcagtaactaccatcatggtagcagcgcgcagaatacttccgcgcaacaggacagcgaagaaaccgaataaggtttcgggctgtttttttacacggggagccagcgatcctgcgttccccgctgatctatttagagggttatacgcttgtttgaccgttatgatgctggtgagcaggcggtactggtacacatctattttacgcaagacaaagatatggaagacctccaggagtttgaatctctggtctcttccgccggtgtcgaagcattgcaggtgattaccggtagccgtaaagcgccgcacccaaagtattttgtaggtgaaggtaaagcagttgaaattgcggaagctgtcaaagcgacgggtgctagcgtcgttctttttgaccatgccctgagcccggcgcaagagcgtaacctggagcgtttgtgcgagtgtcgtgttatcgaccgcaccggccttattttagatattttcgcccaacgtgcgcgtacccatgagggtaagttgcaggttgagctggcgcagctgcgccatctggctacgcgcctggtgcgtggctggacccaccttgaaagacagaaaggcgggataggtttgcgtggtccgggtgaaacccagctcgaaaccgaccgtcgtttgttgcgtaatcgcatcgtgcagatacagagccgcctggaaagagttgaaaagcagcgtgagcaggggcggcaaagccgtatcaaagccgacgttcctactgttagcctggtgggatataccaacgccggtaaatctacccttttcaatcgcatcaccgaagcgcgggtctacgcggcagaccagttgtttgccaccctcgacccgacgttgcggcgtattgacgttgcagatgtcggtgaaaccgtacttgcagataccgtagggtttattcgccacctgccgcacgatctggtggcggcatttaaagccacgttacaagagacgcggcaagccacattactgctgcacgtcattgatgcggcggatgtgcgtgtacaagaaaacatcgaagcggtgaatacggttcttgaagagatcgacgctcacgagatcccaaccctgctggtgatgaacaagatcgatatgctggaagatttcgaaccgcgtattgatcgggacgaagagaacaaaccgaaccgtgtctggctttccgcacagaccggagcggggataccacagctttttcaggctttgacggagcggctttccggcgaggtggcgcagcatacattgcgtctgccaccgcaggaagggcgtctgagaagtcgtttttatcagcttcaggcaatagaaaaagagtggatggaggaggacggcagcgtaagtctgcaagttcgtatgccgatcgttgactggcgtcgcctctgtaaacaagaaccggcgttgatcgattacctgatctaacggcgtagcgtctgaagcgtggagtcatatcctctggcgtcgaaagacaacagggatcaccgcataacaaatatggagcacaaacatggcgtggaatcagcccggtaataacggacaagaccgcgacccgtggggaagcagcaaacctggcggcaactctgagggaaatggaaacaaaggcggtcgcgatcaagggccacctgatttagatgatatcttccgcaaactgagcaaaaagctcggtggtctgggcggcggtaaaggcaccggatctggcggtggcagtagtagccaaggcccgcgcccgcagcttggcggtcgtgtcgttaccatcgcagcggcagcgattgtcattatctgggcggccagtggtttctataccattaaagaagccgaacgcggcgtggtaacacgctttggtaaattcagccatctggttgagccgggtctgaactggaaaccgacgtttatcgacgaagtcaaaccggtgaacgtggaagccgtgcgtgaactggccgcttctggtgtgatgctgacgagcgacgagaacgtagtgcgcgttgagatgaacgtgcagtaccgcgtcaccaatccggaaaaatatctgtatagcgtgaccagcccggatgacagcctgcgtcaggctaccgacagcgccctgcgtggagttatcggtaaatacaccatggaccgcattctgacggaaggtcgtaccgtgattcgtagcgatactcagcgcgaactggaagagacgattcgtccgtatgacatgggtatcacgctgctggacgtcaacttccaggctgctcgtccgccggaagaagtaaaagcggcgtttgacgatgcgattgccgcgcgtgaaaacgaacagcaatacattcgtgaagcagaagcgtataccaacgaagttcagccgcgtgcgaacggtcaggcgcaacgtatcctcgaagaggcgcgtgcgtacaaggcccagaccatcctggaagctcagggtgaagtggcgcgctttgctaaacttctgccggaatataaagccgcgccggaaattactcgcgagcgtctgtatatcgagacgatggaaaaagtgttgggtaacacccgcaaagtgctggttaacgataaaggtggcaacctgatggttctgccgttagaccagatgctgaaaggtggtaacgcccctgcggcgaagagcgataacggtgccagcaatctgctgcgtctgccgccagcctcttcctccacaaccagtggagcaagcaacacgagctccaccagtcagggcgatattatggaccaacgccgcgccaacgcgcagcgtaacgactaccagcgtcagggggaataacgatgcgtaagagtgttatcgcgattatcatcatcgtgctggtagtgctttacatgtctgtctttgtcgtcaaagaaggtgagcgcggtattacgctgcgttttggtaaggtactgcgtgacgatgacaacaaacctctggtttatgagccgggtctgcatttcaagataccgttcattgaaacggtgaaaatgctcgacgcacgtattcagaccatggacaaccaggccgaccgctttgtgaccaaagagaagaaagacctgatcgtcgactcttacatcaaatggcgcatcagcgatttcagccgttactacctggcaacgggtggtggcgacattagccaagcggaagtgctgttgaaacgtaagttctctgaccgtctgcgttctgaaattggtcgcctggacgtgaaagatatcgtcaccgattcccgtggtcgtctgaccctcgaagtacgtgacgcgctgaactccggttctgcgggtacagaagatgaagttactaccccggcggcagataacgccattgccgaagcggcagagcgcgtaacggctgagacgaagggcaaagttccggtcatcaacccgaacagtatggcggcgctgggtattgaagttgtcgatgtgcgtatcaagcagatcaacctgccgaccgaagtgtctgaagcgatctacaaccgtatgcgcgccgagcgtgaagcggtagcgcgtcgtcaccgtagtcaaggtcaggaagaagcggaaaaactgcgcgcgactgccgactatgaagtgaccagaacgctggcagaagctgagcgtcagggccgcatcatgcgtggtgaaggcgatgccgaagcagccaaactgtttgctgatgcattcagtaaagatccggacttctacgcattcatccgtagcctgcgtgcttatgagaacagcttctctggcaatcaggacgtgatggtcatgagcccggatagcgatttcttccgctacatgaagacgccgacttccgcaacgcgttaatataacgactgcggtacaggtcaataaagccaccgcatcctcagggatgtcggtggttttctttttctataaggataatgaatgaatagcacaatctggctggcgcttgccctggttttggtactggaaggtttagggccgatgctttacccgaaggcatggaagaagatgatctctgcgatgaccaatttgcccgataatattttacgtcgttttggcggtggacttgtggttgcgggcgttgtggtctactacatgttgaggaaaacgattggctgaacaaaaaacagactgatcgaggtcatttttgagtgcaaaaagtgctgtaactctgaaaaagcgatggtagaatccatttttaagcaaacggtgattttgaaaaatgggtaacaacgtcgtcgtactgggcacccaatggggtgacgaaggtaaaggtaagatcgtcgatcttctgactgaacgggctaaatatgttgtacgctaccagggcggtcacaacgcaggccatactctcgtaatcaacggtgaaaaaaccgttctccatcttattccaagtggtattctccgcgagaatgtaaccagcatcatcggtaacggtgttgtgctgtctccggccgcgctgatgaaagagatgaaagaactggaagaccgtggcatccccgttcgtgagcgtctgctgctgtctgaagcatgtccgctgatccttgattatcacgttgcgctggataacgcgcgtgagaaagcgcgtggcgcgaaagcgatcggcaccaccggtcgtggtatcgggcctgcttatgaagataaagtagcacgtcgcggtctgcgtgttggcgaccttttcgacaaagaaaccttcgctgaaaaactgaaagaagtgatggaatatcacaacttccagttggttaactactacaaagctgaagcggttgattaccagaaagttctggatgatacgatggctgttgccgacatcctgacttctatggtggttgacgtttctgacctgctcgaccaggcgcgtcagcgtggcgatttcgtcatgtttgaaggtgcgcagggtacgctgctggatatcgaccacggtacttatccgtacgtaacttcttccaacaccactgctggtggcgtggcgaccggttccggcctgggcccgcgttatgttgattacgttctgggtatcctcaaagcttactccactcgtgtaggtgcaggtccgttcccgaccgaactgtttgatgaaactggcgagttcctctgcaagcagggtaacgaattcggcgcaactacggggcgtcgtcgtcgtaccggctggctggacaccgttgccgttcgtcgtgcggtacagctgaactccctgtctggcttctgcctgactaaactggacgttctggatggcctgaaagaggttaaactctgcgtggcttaccgtatgccggatggtcgcgaagtgactaccactccgctggcagctgacgactggaaaggtgtagagccgatttacgaaaccatgccgggctggtctgaatccaccttcggcgtgaaagatcgtagcggcctgccgcaggcggcgctgaactatatcaagcgtattgaagagctgactggtgtgccgatcgatatcatctctaccggtccggatcgtactgaaaccatgattctgcgcgacccgttcgacgcgtaattctggtacgcctggcagatattttgcctgccgggcgaacagtgtgatacattgctgtgtcgggtaagccattacgctatccgacacagtgttaaatcctcgcttttttccttccccgaactgaaataaattagcgacacagcttgtggctggtttatcatcaatataaatgtattttttcccgatttcccttttgaggttgatgtgcagttaacgagtttcactgattacggattacgtgcgctgatctacatggcgagtttgccagaagggcggatgaccagtatttctgaagtgactgacgtctacggcgtctcccgtaatcatatggtcaaaataatcaatcaacttagtcgtgccggctacgtgactgctgttcgtggaaaaaatggcggcattcgcctgggtaaaccggcgagtgcgatacgtattggtgatgtggtgcgcgagctggagcccttaagcctggtgaattgcagcagtgagttttgccacattacacctgcctgtaggttgaaacaggcactttctaaggccgtgcaaagttttcttacggaactggataactacacgcttgccgatttggttgaagagaatcaaccgctttataaattattgctggtggagtgacgaaaatcttcatcagagatgacaacggaggaaccgagatgagtcaagatcctttccaggaacgcgaagctgaaaaatacgcgaatcccatccctagtcgggaatttatcctcgaacatttaaccaaacgtgaaaaaccggccagccgtgatgagctggcggtagaactgcacattgaaggcgaagagcagcttgaaggcctgcgtcgccgcctgcgcgcgatggagcgcgatggtcaactggtcttcactcgtcgtcagtgctatgcgctgccggaacgcctcgacctggtgaaaggtaccgttattggccaccgtgatggctacggctttctgcgggttgaagggcgtaaagatgatttgtatctctccagcgagcagatgaaaacctgcattcatggcgatcaggtgctggctcagccgctgggtgctgaccgtaaaggtcgtcgtgaagcgcgtattgtccgcgtactggtgccaaaaaccagccagattgttggtcgctactttaccgaagcgggcgtcggctttgtggttcctgacgacagccgtctgagcttcgatatcttaatcccgcccgatcagatcatgggcgcgcggatgggctttgtggtcgtagtcgaactgactcagcgtccgactcgccgcaccaaagcggtgggtaaaatcgtcgaagtgctgggcgacaatatgggcaccggcatggcggttgatatcgctctgcgtacccatgaaattccgtacatctggccgcaggctgttgagcaacaggttgccgggctgaaagaagaagtgccggaagaagcaaaagcgggccgtgttgatctgcgcgatttaccgctggtcaccattgatggcgaagacgcccgtgactttgacgatgcagtttactgcgagaaaaaacgcggcggcggctggcgtttatgggtcgcgattgccgacgtcagctactatgtgcgtccgagtacgccgctggacagagaagcgcgtaaccgtggcacgagcgtgtacttccctagccaggttatcccgatgctgccggaagtgctctctaacggcctgtgtagcctcaacccgcaggtagaccgcctgtgtatggtgtgcgagatgacggttagcagcaaaggccgcctgacgggctacaaattctacgaagcggtgatgagctctcacgcgcgtctgacctacaccaaagtctggcatattctgcagggcgatcaggatctgcgcgagcagtacgccccgctggttaagcatctcgaagagttgcataacctctataaagtgctggataaagcccgtgaagaacgcggtgggatcagttttgagagcgaagaagcgaagttcattttcaacgctgaacgccgtattgaacgtatcgaacagacccagcgtaacgacgcgcacaaattaattgaagagtgcatgattctggcgaatatcagcgcggcgcgtttcgttgagaaagcgaaagaaccggcactgttccgtattcacgacaagccgagcaccgaagcgattacctctttccgtagtgtgctggcggagctggggctggaactgccgggcggtaacaagccggaaccgcgtgactacgcggagctgctggagagcgttgccgatcgtcctgatgcagaaatgctgcaaaccatgctgctgcgcagcatgaaacaggcgatttacgatccagaaaaccgtggtcactttggcctggcattgcagtcctatgcgcactttactagcccgattcgtcgttatccagacctgacgctgcaccgcgccattaaatatctgctggcgaaagagcaggggcatcagggcaacaccactgaaaccggcggctaccattatagcatggaagagatgctgcaactgggtcagcactgtagcatggcggaacgtcgtgccgacgaagcaacgcgcgatgtggctgactggctgaagtgtgacttcatgctcgaccaggtaggtaacgtctttaaaggcgtaatttccagcgtcactggctttggcttcttcgtccgtctggacgacttgttcattgatggtctggtccatgtctctagcctggacaatgactactatcgctttgaccaggtagggcaacgcctgatgggggaatccagcggccagacttatcgcctgggcgatcgcgtggaagttcgcgtcgaagcggttaatatggacgagcgcaaaatcgactttagcctgatctccagcgaacgcgcaccgcgcaacgtcggtaaaacggcgcgcgagaaagcgaaaaaaggcgatgcaggtaaaaaaggcggcaagcgtcgtcaggtcggtaaaaaggtaaactttgagccagacagcgccttccgcggtgagaaaaaaacgaagccgaaagcggcgaagaaagacgcgagaaaagcgaaaaagccaagcgcgaaaacgcagaaaatagctgcagcgaccaaagcgaagcgtgcggcgaagaaaaaagtggcagagtgatcaataccctctttaaaagaagagggttagattgctgacaaaatgcgctttgttcatgccggatgcggcgtgaacgccttatccggcctacataatcacgcaaattcaatatattgcagagatcatgtaggccggataaacgtagtgcatcaggcaaaacgtaaacaacgagtacattaatgagcgaaatgatttacggcatccacgcagtgcaggccctgctggagcgcgcccctgaacgttttcaggaagtctttattttaaaaggccgtgaagataaacgtctgttaccgctgattcacgcccttgagtctcagggcgtggttatccagttggcaaaccgccaatatctcgacgagaaaagcgacggtgccgtgcatcagggcattatcgcccgcgtgaagccaggacgtcagtatcaggaaaacgatctgccggatctgatcgctagcctcgatcaaccgttcctgctgatcctcgacggcgtaaccgatccgcacaacctcggcgcgtgcctgcgtagtgcggacgccgcaggcgttcatgcggtgattgtgccgaaagatcgctccgcacagctcaacgctacggcgaaaaaagtagcctgcggcgcggcagaaagcgttccgctgattcgggtgactaaccttgcgcgcaccatgcgtatgttgcaggaagagaatatctggatcgtcggtacggcaggcgaggcggatcatacactctatcagagcaaaatgaccggacgcctggcgctggtgatgggtgcggaaggtgaaggtatgcgtcgcctgactcgtgaacattgcgatgagttgatcagcatcccgatggctggaagcgtttcttccctgaacgttagcgttgcgaccggaatttgcttatttgaagcggtgcgccagcgcagctaatttctcagaattatgaaaagccatccagatttggatggtttttttttgtctatagctggtaagataattacgtattgcaaatattcattttattaatatttaaacttaatctatatggaataatatatgacatggaatccgttggcgctagcgacggcgctgcaaactgtacctgaacaaaatattgatgtaacaaatagcgagaacgcattaattattaaaatgaatgattatggcgatttgcaaatcaatattctttttacttcccgccaaatgattatcgaaacctttatttgtccggtgagtagtatcagcaatccagatgaatttaataccttcttattaagaaatcagaagatgatgccgttgagtagcgtagggatctccagcgtacaacaggaagagtattacattgttttcggggcgttaagccttaaatcttctcttgaagatatcctgcttgagataaccagcctggtagataacgcattggatctggctgaaattacagaagaatatagtcactaattacaaggacgggtatttatgggaattttaaaaagtttatttacgctggggaaaagctttatctcccaggcggaagaatccattgaagaaacccagggcgtgcgcatgctggaacagcatattcgtgacgctaaagctgaactcgataaagccggaaaatctcgcgttgatctgctggcgcgggtgaaattaagtcacgataagctgaaagatttacgtgagcgcaaagccagtctggaagcccgtgcgctggaagcgttaagcaagaacgttaatccgagcttgattaacgaagttgctgaagaaatcgcgcgccttgagaatctcattaccgctgaagagcaagtgttgagcaatctggaagtctcccgtgatggcgtggaaaaagcagttacagcgacagcgcagcgtatcgctcagtttgagcagcaaatggaagtcgttaaagccactgaagccatgcagcgtgcacaacaggctgtaacaacctctaccgttggcgcatcttccagcgttagcacagcggcagaatccttaaaacgcctgcaaacgcgtcaggccgaacgtcaggctcgcctggatgctgccgcacagttggagaaagtcgcagacggtcgcgaccttgacgaaaagctggcggaagccggaattggcggtagcaataaaagtagcgcccaggatgtattagcaagactgcaacgccaacagggcgagtaatttttttgccagcctcgctaaaaggctggcaactattttaaggataaaatatgtctggttttttccagcgtctgtttggcaaggataataagccagctatcgctcgtggtccgctgggacttcatctcaatagtggctttacgctcgacacgttagcgtttcgtttgctggaagatgaattgctgattgcgctgccgggtgaggaatttacggtagccgccgtcagccacatcgatctgggcggcggtagtcagattttccgctactacactagtggcgatgagtttctgcaaatcaataccaccggcggcgaagatattgatgacattgatgatatcaagctctttgtctatgaagagagctacggtatcagtaaagagagtcactggcgcgaggcgatcaacgccaaagcgatgggagcaatgaccttaaactggcaggaaaaacgctggcagcgattttttaacagcgaagaaccgggaaatatcgaacccgtctacatgctggaaaaagtagaaaatcaaaaccatgccaaatgggaggtccataattttaccatgggctaccaacggcaagtaaccgaagatacttacgaatatttgctgctaaatggtgaggaatcttttaacgatctcggcgagccagagtggttatttagccgcgcgttgggtgtcgatatcccgctgacaagtcttcatattattggttaattacaaggacgtttacaatgcatatactggatagtcttcttgcctttagcgcctatttttttattggcgtggctatggtgattatttttctgtttatctattctaaaattacaccgcacaacgaatggcagttaatcaaaaacaataataccgcggcgagtctggcgttcagcggtacattgttgggttacgttatccccttatccagtgcggcaatcaatgcggtgagtattccagactatttcgcctggggcgggattgcactggtgattcagttactcgtttttgctggtgtcagactttatatgcccgcattaagcgaaaaaattattaatcacaataccgcagcaggaatgtttatgggaaccgccgcgctggctggcggtatttttaacgcagcttgtatgacatggtaatggacgatcatggccagaaaacgcaaaagtagaaataacagtaaaattggtcacggagcgattagtcgcattggtagaccgaataatccttttgaaccgtgccgcaatcgctacgcacaaaaatacttaacgttggcgctaatgggcggtgccgcttttttcgtattgaaaggttgtagcgatagtagcgatgtcgataacgacggcgacggaacgttttacgcgacagtgcaggattgtattgatgacggtaataatgccgacatttgcgcgcgtggctggaacaacgccaaaacggcattttatgccgatgttccgaagaatatgactcagcagaactgtcagtctaagtacgaaaattgctactacgacaatgttgaacagagttggatcccggtcgtttctggatttttgttaagccgggttattcgtaaagatcgcgatgagccgtttgtttataacagcggcggttcctcttttgctagccgcccagtctggcgcagcacttctggtgattactcctggcgctccggttctggcaaaaaagagtcttactctagcggcggctttaccaccaaaaaagcgtctaccgtttctcgcggcggctatggtcgttcttccagcgcccgtgggcattggggaggctaatcatgctgagacacaacgttcctgtgcgacgggatctggaccagatcgccgctgacaacggtttcgactttcatatcatcgacaatgaaatctattgggatgagagtcgggcttaccgttttactctgcgccagattgaagagcagatcgaaaaaccgactgcggaactgcatcagatgtgccttgaggtggtggatcgcgcggtaaaagatgaagagatcctgacgcaactggcgatcccgccgttgtactgggatgtgatcgctgaaagctggcgcgcccgcgatcctagcctgtatggacggatggattttgcctggtgtggcaatgcgccggtgaagctgctggagtacaacgccgatacgccaactagtttgtacgagagcgcttattcccagtggctgtggctggaggatgcccggcgcagcggcattattccgcgtgatgccgatcagtacaatgctattcaggaacgcctgattagtcgctttagcgagctttacagtcgggaaccgttttatttttgctgctgtcaggacaccgatgaagacaggagtaccgtgctgtacttgcaggactgcgcccagcaggcagggcaggagagccggtttatctacattgaagatctcggtttgggcgtcggcggcgtactgaccgatcttgatgataatgtcatccagcgtgcatttaagctgtatccgctggagtggatgatgcgtgacgataacggtccgctgctgcgcaagcgtcgcgagcaatgggtggagccgttatggaaaagtatcttgagtaataaagggctaatgccgctgctttggcgcttcttccctggtcatcctaatcttcttgcgtcctggttcgatggcgagaaaccgcagattgccgctggcgaaagctatgtgcgtaaaccaatctatagccgcgaaggcggcaacgtcaccatttttgacggcaagaataacgttgttgaccacgctgatggtgattacgccgatgaaccgatgatctaccaggcgtttcaacctctgccgcggtttggcgatagctacacactcatcggtagctggattgtcgatgatgaagcgtgcggaatggggatccgtgaagataacacactgatcaccaaagacaccagtcgtttcgttccgcattacattgctggataagaatgttttagcaatctctttctgtcatgaatccatggcagtgaccatactaatggtgactgccattgatggagggagacacagtgcactggcaaactcacaccgtttttaatcaacctataccattaaataacagcaacttatacctgtctgatggcgcgctctgcgaagcggtaacgcgtgaaggtgctggctgggatagcgattttctagccagtattggtcagcagttaggaacggctgaatcccttgaactggggcggctggcgaatgtgaatccgcctgaattattgcgctacgatgcgcaaggacgccgtctggacgatgtgcgttttcaccccgcctggcacctgctgatgcaggcgctatgtaccaatcgggtgcacaatcttgcctgggaagaagacgctcgctccggcgcatttgtggcgcgcgcggcgcgttttatgttacatgcgcaggttgaggcagggagcttatgtccgataaccatgacctttgccgccacgccattgttgttacagatgttacccgcgccgtttcaggactggaccacgccgctattgagcgatcgctacgattctcacttattgccaggtgggcaaaaacgcggtttgttgattggcatgggaatgacggaaaagcagggcggttccgatgttatgagcaacaccacccgtgcagagcgtctggaagatggctcttatcggctggtggggcataaatggtttttcagcgttccgcaaagcgatgcgcatctggtgctggcgcagaccgcgggtggtctgtcctgcttttttgtgccgcgctttttgcctgacgggcaacgcaacgcgattcgcctcgagcggctgaaagataagctgggtaatcgctctaacgccagttgcgaagtggagtttcaggatgccattggttggttgttggggctggaaggggaaggaattcgtctgatcctgaaaatgggtgggatgacgcgttttgattgcgccctgggtagccatgccatgatgcgccgtgcatttagcctggcgatttatcatgcacatcaacgccatgtttttggtaatccattgatccaacagccccttatgcgtcatgtcttaagtcgcatggcacttcagcttgaagggcaaacggcgttgctgtttcgtcttgcgcgagcgtgggaccggcgtgccgatgccaaagaagccctgtgggcgcgtttatttacgcctgcggcaaaatttgtgatctgcaaaagaggtatgccgtttgtggccgaagcgatggaggtgctgggcggcattggttattgcgaggagagtgagctgccgcggctttaccgggagatgccggtaaacagtatttgggaaggttccggcaatattatgtgcctggatgtgttgcgcgttctcaataagcaagcgggcgtatacgacttattgagcgaagcatttgtggaagtgaaagggcaggatcgctattttgatcgcgcggttcgtcgtttacagcagcagctgcgtaagccagctgaagaactggggcgagagattactcatcagctattcctgctgggctgcggtgcgcaaatgttgaaatatgcttctccgccaatggcgcaggcgtggtgtcaggtgatgttagatacgcgcggcggcgtacggttgagtgagcagatccagaatgatttattgctgcgggcgacggggggagtgtgtgtgtaagcgtatacgactgatgcgacgctggtttcgattaactaaatgaaatatgtgaaaattgtaggccggacaaggcgctcgcgccgcatccggcattgttcatttgctgtagatgacactcatgcatacagtatcgcctgtacgcgccagttatcaggctgctggtcttcgtacatggtaataatgcggtaccaactcgcaccttgttcatcggcctttaacgccacgatacgttccacgtcctgcggatccccactaatattgctaacactgatctgacctatttcattcaggcccgtcacgcagtcagcactggcgaattctgcagactgtgccgtggcgctcgcaggataagtcactaattgcaggctgggactggcaagtaattgtttcatcgtcagctccatttttcgtttccccacatgttgcagggcattccatcgcggtaataaacgcccaggcttccagccggtaatttattgtgcacaggtaaacgcatagggacgcaaagcaatgtaaagctgactatgtaagttgtctgatttatttacggtacaaaatggcttgactataccactgtcctgtcacgatggtttcgtccaccatgacgacaacgtaataatcagcttttgcagcgacagctttcgctttgatttctgctaatgcgtcatccggagaaccccgaaccatcgtgcttacgctacctattcgctgtaacccttgcgtctggtcgcggcgaatctcttgcggatggtccgttactggcggtgctggctgtggcgtaccttgcagtgcgctacaggcacttaacatcaacaccaataataaactggcaaaccggtaaataacgctattacgtttcctgctaaccatagtgtagtgccttattaatttaactttgggggaatgttcccgaattgttacctggtacgcgattttcgaatgaaaacgtgacgaaagcgtaacccacatctcaacattatgaactaataccgccagcagaaacttgtgctaaggatttcttcatgtcataccagacaaaaaggagagacagatgattgaaatagaaagtcgcgagctggcagatattcccgttcttcatgcttatcctgtcgggcaaaaagataccccgttaccgtgcgtaattttttatcacggctttactagttccagtctggtgtatagctattttgccgttgcgctggcgcaggctggtttgcgggtgatcatgccggatgcgcccgatcacggtagccgttttagtggtgacgcagcgcggcggttaaatcaattctggcaaatcttgctacaaagtatgcaggaattcactactttacgtgcggcaatagccgaagaaaactggctgcttgatgaccgtctggcagtcggtggcgcgagcatgggcgcgatgacggcactggggattaccgctcgccaccccacggtgagatgtaccgccagcatgatgggaagcggctattttacaagtctcgcccgtagtctgtttccaccgctgatacctgaaacggcagcacagcagaatgaattcaataacattgtcgcgccactggcagagtgggaagcgacaaaccacctggaacaacttagtgacagacctctactgctgtggcatggcctcgacgatgacgttgtgcctgccgacgaaagtctacgtttgcagcaggccttaagcgagacgggacgggataaactgctaacctgtagttggcagccaggcgtgcgtcaccgcattacgcctgaggcgttagatgctgccgtgacatttttccgccagcatctttaaacacgcagaatgctgaccccttgcgcttccagttgttgcaggatttccgggttagcatttttgccggtgataagcatatcgatttgatcggcacggctaaaaagcattcccgcgcgttcgccaatcttactgctatcaaccagtaccaccagtttccctaccacgctcagcatcttctgctctgccattgctgtcagcatatcggttttatacaacccttctgcggtcagcccttttccgctggtaaacatccagtgcccggcatagagactgttttcgctgccctgcgggcttaaagtgatggactgacttttgttgtactgtccgcccataatgatcacgctgtcatgttcttgatcgatcaggtaatttgccagcggtagataattagtgatgatttgcactggcttgccacacatttcccgcccaagcagaaacgcggtggagccgcagttgatgactacgctttcgcccggattaaccagctggctggccgctttagcgatacgtactttttcatcgtgattctgcgcctgatgcagattcatcggcgtccagcgcgggcgctgttgggtaatagcttctgcgccattgcgcacttttttcagtttgccgctttcgtcaagtttattgatatcgcgtcgcgcagtggcagggctaattcccagacgctcaacgactttctcaacggtcacaaagcccaattgtgcgagcatttccaggaggatttgatgtctttgtgcttcagtcatgagctattccgataaaatttgatttttttagatgatatttgaaatagccaggaaatactacgccggatagcgcgaacttctccacgctacccggtataaacgacagattacaggaaactcttgaacggcagatccggttcaatagtgaagcaatcatcgaaaccgcgcggatagtggtactcgaagttgtctttatccagcggccaggtaaatttgccacccacctgccagataaacggcttgaagccatacttcaggcgatcttttttcatctcccacagcacgcggatctcttgcggatcggcctggaagttactccagatatcgtggtggaacgggatcactactttcgcattcagcgcttcacccatacgcagcatatcggcgctggtcattttgtcggtgataccgcgcgggttttcgccgtagcttcctaacgccacgtcgatctgatgttcgttaccgtgcttcgcataatagttagagtagtgggagtcgccgctgtgatacagggagccgccaggcgttttgaacaggtagttcaccgcgcgatcgtccatgccatctggcagtacgccagccgctttttgatcggcaggcagggtgatcagtgcagtacggtcgaaagcatcaagcgcatgaatttcaatgtctttcacttttactacatcgcccggtttgaccacgatgcaacgctctttcggtacgccccagccaatccacaaatccacacaggttttcggtccgataaacggtacgtcatctgcacaattctgcatcacggcagcagcgacgttaacgtcgatatgatcgttgtgatcgtgagtcgccagtaccgcgtcgatctggcgaatcgcaaacggatcaagaacaaacggggtggtacgcaggtttggctgcagttttttcacgccagccatgcgctgcatctggtgaccctgtttcattaacgggttaccgtgactttgtttgccagtgccgcaccagaaatcaacgcaaacgttggtgccaccttcgcttttcaaccagatcccggtgcagccaagccaccacatcgcaaatgtgccaggagcgacctgttcttgttcaatttcttcattcaaccagctaccccactccgggaaagtgctcaggatccaggattcacgggtgatacttttcactttactcatcgccatttaccttcatgatagttcaattcgaatcaatatgtgattggttttgattaatcctgacactattttttcaggaaggcaatgaccattttttgactttttgccagggaagttgttgttgattttgagtatggaaagatttaatggaatgtgtaattcaattaactaaatgaatttaaatggataattgtttcgttgtgtgaatcccactctatccatgtggaattatttgcgggtcgcgtcacatttaatcataaataatcttgttgtgattacttttgaaaattagagtgagtgcacaacattccgggtgtgtggaatacccggttacctcttcttcaggagatcgttatggagatcctctacaacatctttaccgtgttttttaaccaggtcatgaccaatgccccgttgttgctgggtattgtgacctgtctgggctacatcctactgcgcaaaagtgtcagcgttattattaaaggcacgattaaaaccataattggtttcatgttgttgcaggcagggtccggcatcctcaccagcaccttcaaaccggtggtggcgaaaatgtccgaagtctacggcattaacggcgcaatttccgatacctacgctagtatgatggcaaccatcgaccgcatgggcgatgcctatagctgggtgggttacgccgtattgttagcgctggcgctgaacatctgttacgtgctgttgcgtcgcattaccggcattcgcacaatcatgttgaccggccacatcatgttccagcaggccgggttgattgccgttacgctgtttatcttcggctactccatgtggaccaccattatctgtaccgcgattctggttagcctctactggggcatcacttccaacatgatgtacaagccgactcaggaagtgacggatggctgtggtttctccatcggtcaccagcagcagtttgcaagttggattgcctataaagtcgcgccgttcctcggcaaaaaagaggagagcgttgaagacctcaaattgccgggctggctgaacattttccacgacaacatcgtctccacggcgattgtgatgaccatcttctttggtgccattctgctctccttcggtatcgacaccgtgcaggcgatggcaggcaaagtgcactggacggtgtacatcctgcaaactggtttctcctttgcggtggcgatcttcatcatcacgcagggtgtgcgcatgtttgtggcggaactctctgaagcatttaacggcatttcccagcgcctgatcccaggtgcggttctggcgattgactgtgcagctatctatagcttcgcgccgaacgccgtggtctggggctttatgtggggcaccatcggtcagctgattgcggttggcatcctggtcgcctgcggctccagcatcctgattattcctggctttatcccgatgttcttctctaacgccaccatcggcgtgttcgctaaccacttcggcggctggcgtgcggcgctgaagatttgtctggtgatggggatgatcgaaatctttggttgcgtctgggcggtgaaactcaccggtatgagtgcctggatgggcatggcggactggagcattctggcaccgccgatgatgcaaggcttcttctccatcggtatcgcctttatggccgtcatcattgtaattgcactggcttatatgttcttcgctggccgcgcgctgcgcgcagaagaagatgcagaaaaacaactggcagaacagtctgcttaataaggagttttgattatgaccgtacgtattctggttgtgtgtggcaacggacaaggcagttccatgatcatgaagatgaaagtggaccagtttttaacccaaagtaacattgaccatacggtaaacagctgcgcggttggcgagtacaaaagcgagttgagtggcgcggatatcatcatcgcttctacgcacattgcgggcgaaatcaccgtgaccggcaacaaatacgtggttggcgtgcgcaacatgctctctcctgccgactttggcccgaaactgctggaagtgatcaaagagcatttcccgcaggatgtgaagtaaggacgcgccatgaaattacgtgatagcctggcggaaaataaatccatccgcctgcaggctgaagcagagacatggcaggaagcggtgaaaatcggcgttgacctgctggtggcggcagatgtggtagagccgcgttactaccaggcgattctggatggcgttgaacagttcggtccttatttcgttatcgctccgggcctggcaatgccgcacgggcgtccggaagagggcgttaagaaaaccggtttctctctggtaacgctgaaaaagccgctggagttcaaccacgatgacaacgatccggtggatatcctcatcaccatggcggcggtcgatgccaatactcaccaggaagtgggcatcatgcagatcgtcaacctgtttgaagatgaagagaattttgaccgtttacgcgcctgccgtaccgagcaggaagtactggatctcattgaccgcaccaacgcggcagcttaagaaggaattgaacatgagtttaccgatgttgcaagtcgcgctggacaaccagactatggatagcgcctacgaaaccactcgcctgattgccgaagaagtcgacattatcgaagtgggcaccattctgtgcgtgggcgaaggcgtgcgtgcggttcgtgacctgaaagcgctctacccgcacaaaatcgtactggcagacgccaaaattgccgatgcaggcaaaatccttagccgtatgtgcttcgaagccaacgctgactgggtgacggtaatttgctgtgcggatatcaacaccgccaaaggcgcgctggacgtggcaaaagagtttaacggcgacgtgcagatcgaactgaccggttactggacctgggaacaggcgcaacagtggcgcgatgcaggcattgggcaggtggtttatcaccgcagccgtgacgcgcaggccgcaggcgtggcgtggggcgaagcggacatcaccgcgatcaaacgtctttccgatatgggcttcaaagtcaccgtcaccggaggcctggcgctggaagatctgccgctgttcaagggtattccgattcacgtctttatcgcgggccgtagtatccgtgatgccgcttctccggtggaagccgcacgtcagttcaaacgttccatcgctgaactgtggggctaaggagcggatatgttgtccaaacaaatcccgcttggcatctatgaaaaagcgctccccgccggggagtgctggctggaacgcctgcaactggcaaaaacgttaggcttcgattttgtcgaaatgagcgtagatgaaactgacgatcgcctgagccgcctcaactggagccgcgagcagcgtctggcgctggtcaatgcgattgttgaaaccggcgtgcgcgtgccgtccatgtgcctttctgctcatcgtcgtttcccgctgggcagtgaagatgacgcggtgcgggcgcaggggctggagattatgcgtaaagctatccagttcgcccaggatgtcggtattcgcgtgatccagctggcgggctatgacgtttactatcaggaagccaataacgaaacgcgtcgtcgtttccgtgacggcctgaaagagagcgttgagatggcaagccgcgcgcaggtgacgctggcgatggagatcatggattatccgttgatgagctccatcagcaaggcgctgggatacgcgcactatctcaacaatccgtggttccagctctacccggatatcggcaacctgagcgcgtgggacaacgatgtgcagatggagttgcaggccggaatcgggcatatcgtcgcggtacatgtgaaagacaccaaacctggcgtcttcaaaaacgtgccgtttggcgaaggtgtagtggatttcgaacgttgtttcgaaacgctcaaacagagtggctattgcgggccgtacctgattgagatgtggagcgaaacggcggaagacccggcggcagaagtggcgaaagcgcgtgattgggtgaaagcgcgcatggcgaaagcgggcatggtggaggcggcataatgcaaaagctaaaacagcaggtatttgaagccaacatggagctgccgcgctacgggctggtgacctttacctggggcaacgtcagcgctatcgaccgcgaacgcgggctggtggtgatcaagcccagcggcgttgcctacgaaaccatgaaagcggccgatatggtggtggttgatatgagcggcaaggtggtggaaggggagtatcgcccatcttccgacactgcgacgcatctcgaactctaccgtcgttacccgagccttggtggcattgtccatacccactccactcatgccaccgcatgggcgcaggcggggctggcgatcccggcgttaggcaccacgcacgccgactacttctttggcgacattccgtgtacgcgcgggttaagcgaagaagaggtgcagggcgagtatgaactgaacaccggcaaagtgattatcgaaacgctgggcaacgccgagccgctgcatacgccgggaattgtggtgtatcagcacgggccgttcgcctgggggaaagatgctcacgatgcggtgcataacgcggtggtgatggaagaagtggcgaaaatggcgtggattgcccgcggcattaacccacaactcaatcacatcgacagcttcctgatgaataaacacttcatgcgtaaacacggtcctaacgcttattacgggcagaagtaaaacacgcgctgcggaaatttccttcctcgggagataactggtctaattccgcagccgtttttcaaaaaaaagccccctgcgaagggggcaaagcaaactatggcaatgtttcgttggttatacctggtgttagcgataaatatccgcgctggcgtgcatattgccgttactccccggttcccgcatcagaattacgtggtagtacgttgcgccttgcgcatctgtttcttcatttaatgcctgacgtgcttcgctttcagtggcgaaattatgattgatataaatcacgcctaagctttgcacatcgtccatatttctggcctggtggttattaatttcaatggctgcccatgtatttgcacttagcaaaagcacagccagaagggctaaaacacgactgaacatagatacctcctcgacggctgactttgtgtgctctcctctgtgatgatcttctgatttaattttaatcaatgataaagaagttgatggtgaccatttctgatgcagttgttcaaaaaaacaccatgatgaagtgtgatgaacttcaaatcagcgtgttagaggttaattgcgaaaggggagatttatttcggctctgcccttgagtttagcgaggcatacaagtactataacgcgtcatttttcagccgacctttaacacgttccttgcctccccgggattcggctgacccagacaggaggctgaataatccgtaaggagcaattcgatgcgtcattacgaaatcgtttttatggtccatcctgaccagagcgaacaggttccgggcatgatcgagcgctacactgctgccatcactggtgcagaaggcaagatccaccgtctggaagactggggccgccgtcagctggcttacccgatcaacaaactgcacaaagcacactacgttctgatgaatgttgaagctccgcaggaagtgatcgatgagctggaaactaccttccgcttcaacgatgccgttatccgcagcatggttatgcgtaccaagcacgctgttaccgaagcatctccgatggttaaagcgaaagacgagcgccgtgagcgtcgcgatgatttcgcaaacgaaaccgctgatgatgctgaagctggggattctgaagagtaatttctgatgaccaaccgtctggtgttgtccggcaccgtgtgcagggctccccttcgaaaggtcagtccaagtggaattcctcactgccagttcgtgcttgagcatcgttctgtgcaggaggaagccggctttcaccggcaggcgtggtgtcaaatgcccgttattgttagcggacacgaaaaccaggccattactcacagtataacggtcggcagtcgcataaccgttcaggggttcattagttgccacaaggcaaagaacggactgagcaaaatggttttgcatgccgagcagattgaattgatagattctggagactaaccatatggcacgttatttccgtcgtcgcaagttctgccgtttcaccgcggaaggcgttcaagagatcgactataaagatatcgctacgctgaaaaactacatcaccgaaagcggtaagattgtcccaagccgtatcaccggtacccgtgcaaaataccagcgtcagctggctcgcgctatcaaacgcgctcgctacctgtccctgctgccgtacactgatcgccatcagtaatcggtcacggtccattaatacgactttgagaggataaggtaatgcaagttattctgcttgataaagtagcaaacctgggtagcctgggtgatcaggtaaacgttaaagcgggctatgctcgtaacttcctggtaccgcagggtaaagctgttccagctaccaagaaaaacattgaattcttcgaagctcgtcgcgctgaactggaagctaaactggctgaagttctggcagctgctaatgctcgcgctgagaaaatcaatgcactggaaactgttaccatcgcgtctaaagctggcgacgaaggtaaactgttcggttccatcggtactcgcgacatcgctgacgctgtaactgcagctggcgttgaagtggctaagagcgaagttcatctgccgaacggcgttctgcgtaccactggcgaacacgaagtgagcttccaggttcacagcgaagtattcgcgaaagtgatcgtaaacgtagtagctgaataattcgttattcaacgagacgtaaaaacgccgaccattggtcggcgttttgctttctatttttcgtcaggtattagtttcgcaagtagatccattcaccattctcttgtgtccataagtcaggatggtttgctggcgttagatacatacgagcgcaactgatgtctcgctcctgcggcactcgctcgaaacccaaaccgctgtagattgcggcactactacttaaggaacgcagaccaattttcaaatcatggggtaaatcagaatacgcgtttagcaatgcagcaatgatgaatccgagggcattagaaacgcctgtaacagtgcgaagttggtcgatataaagatcgattgttggtagttcagaactccagcaattaggcatttgggcaggaagggttacaacgtatcctatcgtttggccggtatagtctggagtaccataaccaggtcccaaaaccacttcgtgtattgtgtatttactgttgggttcgaaggattcgacatcttgcaataaatatttcagttctgcggttaacctcgcacccgcgtaagctttattgtatttctgggcgtgaatattatctaatgtagcttcatggttccatccaaaagaattatcaccattcattgtgattccatcgtaagcattacacctcgtcgctaacttattgaatgcttgccagtcactgagatctagtttgtggatctcaacagtacgtctgccatcgcaattatgatctcttccacgattactaagtaatgtagcgcgtgcgtattgatgaaattttaattttactggtttgtcggtggagctaaaacgagataaatatgcaggaaaactataaatagtcgttggtaatgtcattgtaatgttacctgtttaatgtttttataaatatcgcagctgaatgttcacagaaaaaaatcgatattaataaaaataagtttgttttctgaagtggtgaaaatagcggatggtgaaagatattaatatcaaaaatcgctcattatggatataacgatgcacccggggagaaaatgacttccacgccttacaccgtacattcttgttgtgcggtatgtaattattctacgctgtcggtatcggtgtattcgttaatcagcaggttagccagccacaaaaagccattgagaaaattattgattttacatgggattattatattgctaatccttggtttttaaaaattgtgcatagtgaaaatcaaagtaaaggtgtgcattatgcaaaaagtcagcgtctcttagaaattaaccatgcgcacttgcagttaatggaatccttattggatgaagggaagaaacacaatatttttaagccagatatcgacccattgcaggtgaatattaatattgctgcgcttggcggatattatttgatcaaccagcatacgcttggcctggtttatcacatcagtatggttagtccccaggcactggaagccagacgtaaggtcatcaaagagacaatccttagctggcttttggttgaccctagttctaccgcgcacgaataattaccgcgcacgaataaaactgccatccggctggcgggtgaacaggacctgttgattattccccgtatcaatggttaagcccgtcaccacgccgctggcgttctggcggattttcaccatctgcccgttttgcaaattactcagcggcttacccgcgccttctacctgcgccattgcatagacatcggtagcgggcagtccgtggtcgcggaacagctgcgccatcgttttaccgggttcgacacggtaagagcgccattgattatcaattccgctatctggctggaatggttgcgtttgggtagtttgcggctgctcttctggctggccttcctgtataggttctggagcgaccggagccacctgatcaggaccattttgtggggtaactaattgcgcccgcagctgttcttctgtcggcggttgactttggctctgaatatctaactgcgcttcacgcgtcaccaccggcgcgttgggcgtatcatcagatggaagcagaaatccgaccaccaatacaatggcggcaataatgatcccccgacgatgcatcggcggcagcgggtccatgaagcgaaaattgtccggcgcgtgccagactttctccagggttggttttagttcaaagcgcccgggcatggtttcctcctgctccgcgtcttgttcctcaatcatagcctatgaataagctaacgctatgatgtccgtggtaaacccgcctttattatattcatacgggatattgctattgtttctttttccctgggatttgtcatcattcccgcgacaaagttttacccaaagaagtgtggctgatatgctgcccgctactttataccctaagaaaggaaatacgatgaccaccccaacttttgacaccatcgaagcgcaagcaagctacggcattggtttgcaggtagggcaacaactgagtgaatctggcctggaagggctgctgccagaagcactggttgcaggtattgccgatgcgctggaaggcaaacatccggctgttccggttgatgtggtgcatcgcgcgctgcgtgaaatccacgagcgcgccgatgccgttcgtcgtcagcgtttccaggcgatggctgctgaaggtgtgaaatacctggaagaaaacgccaaaaaaagaaggtgtgaatagcaccgaatctggcctgcaattccgcgtgatcaaccagggtgaaggcgcaattccggcacgtaccgaccgcgttcgtgttcattacaccggtaaactgatcgacggcaccgtgtttgacagctccgttgctcgtggtgaacccgctgaattcccggttaatggcgtgatccctggctggattgaagcactgactctgatgccggtaggttctaaatgggaactgactatcccgcaggaactggcatatggcgagcgcggcgcaggcgcatccatccctccgttcagcaccctggtgtttgaagtcgaactgctggaaatcctctaagcagcgcattctgttcccctcgaacgagaggggagcaggcattcagcaataaacccttcagtttgccaaacggcgctattttgtgttgcaaagaccccgtaagcgtgtatttttgtgagctgtttcgcgttatcaccgtgatatgacactcactttaaacataaaattaacattagatctaaatcttagtattcatcccgcgtattgttacctaatatcgatgagtcccgatacagattcgtcgtatcatagactgactaaaggccgtagagcctgaacaacacagacaggtacaggaagaaaaaaacatggtagatcaggtaaaagtcgttgccgatgatcaggctccggctgaacagagcctacggcgcaatctcacaaaccgacatattcagcttattgccattggcggtgccattggtacggggttgtttatggggtctggcaaaacgattagccttgccgggccgagcatcattttcgtttatatgatcattggttttatgctctttttcgtgatgcgggcaatgggggaattgctgcttagcaatctggaatacaaatcttttagtgacttcgcttccgatttactcgggccgtgggcaggatatttcaccggctggacttactggttctgctgggttgtaaccggtatggcagacgtggtggcgatcacggcttatgctcagttctggttccccgatctctccgactgggtcgccagcctggcggtgatagtgctgctgctgacgctcaatctcgccaccgtgaaaatgttcggtgagatggagttctggtttgcgatgatcaaaatcgtcgccattgtgagcctgattgtcgtcggcctggtcatggtggcgatgcactttcagagtccgactggtgtggaagcgagtttcgcgcatttgtggaatgacggcggctggttcccgaaaggtttaagtggcttctttgccggattccagatagcggttttcgctttcgtggggattgagctggtaggtacaacagctgcggaaaccaaagatccagagaaaagtctgccacgcgcgattaactccattccgatccgtatcattatgttctacgtcttcgcgctgattgtgattatgtccgtgacgccgtggagtagcgtagtcccggagaaaagcccgtttgttgaactgttcgtgttggtagggctgcctgctgccgcaagcgtgatcaactttgtggtgctgacctctgcggcgtcttccgctaacagcggcgtcttctctaccagccgtatgctgtttggtctggcgcaggaaggtgtggcaccgaaagcgttcgctaaactttctaagcgcgcagtacccgcgaaagggctgacgttcagctgtatctgtctgctcggcggcgtggtgatgttgtatgtgaatcctagtgtgattggcgcgttcacgatgattacaaccgtttccgcgattctgtttatgttcgtctggacgattatcctttgcagctaccttgtgtatcgcaaacagcgtcctcatctacatgagaagagcatctacaagatgccgctcggcaagctgatgtgctgggtatgtatggcgttctttgtgttcgtggtcgtgttgctgacactggaagatgacactcgccaggcgctgctggttaccccgctgtggtttatcgcgctggggttgggctggctgtttattggtaagaagcgggctgctgaactgcggaaataaccgcattatcatgctggatggcgcaatgccatccagcttttagatcactcacccgccagcgcgcgtgggaacagtacattgttttccagactgatgtgatccatcaggtcatcaatcagttcattaatgccgttatacatcgctttccaggtggtgcaggcttctggcggcggtgtgacgttattggtggtgtgtttaatcacttccagcagttcgcccgcttcatcgtgctcgctttccattacgctgattggccccattgcctggctgcccatgccttgtttgatcatcgggaagaggatctgctcttctttcatcatgtggctggaaagctcttcatgcagcatggtcaggtattttgtcagcccttttggcacgctcggtttgtcggcgtgaacgcgctcgactttagtcgcttgcagaatcagctccggcagttgctcgcggtgacgatcgtggtagcgcacgatgatatggtcgatgatttctgccagcggggcgctacgccagtctttctcaatcggttgttcagcgagctttgccagttcagcttcaatgacctcaacatccagttctttacgtgccgccgcgcgcgccagcgtctgcttaccgccacagcagtaatccatatcatatttacgaaacagagcactagcgcgaggaatagagagcgccagttcacctaaaggttggtcgcgataagccatagctgatacctcattcttaataagataagatgtattttaaatgcatctttaaggcaaaagctataacccttacgtagcagaggcttatttaactcactgccagcgtgtcaactttcactgacagattcagttaaaggtttttctggttttgctctgaccgcgatgaccacgccaatcactaacagcgcgataccgctcagcgtcattagcggcggcatttgctggcggagtaaaaaggtgtacagcaaacctgccagcgtttcgaaaacaatcagcggcccgagaatcactgtcggtaatagctggctggcgacgttccagcagagtgcgccaacccaactgcaaagcacggctatcgcaaccatcagactaataaacaccagcggacgggggccaaagggtagggagaagtccggcgtttgcgtattcagccagtaacaagcgacgagatagccgataagactaaccggcagtgtgaccagcgcctgcgctgttgcccacatcatcggatgtttgtcgggattttcccgcagccagcgggcgttgcgcagggcataccacgcccagcagaccacggaaactaacgccagcacgatgccagaggtataacgtgcccagtcaaaatcggggagtccgtggtttaactcagcaatattcacacacgccaggccgatgccaatacaaatcagtgctggggcgagttttccccacgcgagtttgccgtcgcgctggctataaagcagattggcaaagacaggaatgaccaccggcagggtgccgataatcatcgtggaaacaggcgcgccagtacgttgaatggcactggcaaggcagaagtaatagatgaggttgcccatcatagtgagcatcaaggcggtaagccagtcgcgacgcgccaactgacgcagacgcacgcgtcccagccaggcaatgggcagcgcaattaaccctaacgccagataacgccccatgctctgcaacatcgccgggtattccggcacgatcaacggcccgacaaaaataagcccccacatcaaccctgctaacagggcgtacagcacgccgctaatcattactggcatccattgatctgtcagaagaaagttcaggaagcagacatgattgctcccggcatcccgtcattatcagagaggatgcgggaggatgccactttaattaattagttattaacattaaaaagatggcttacgctttcggctaacgttgtcgttgggtggccaatcaatttgctaagtgttttgctgtcatcaaacagaccgcctttgcttgcgccaacgtcagaatccgccagcatatccgccagtccgtcgggcagtccgacgcttttcagtgccgcggcgaaatcggcttcgctcagattttgataggtaacctgtttgccgctctgtttggtcagctctgccgctaactgtgtcaacgtccaggcactatcgcccgccagttcgtaaaccttgccttcgtgaccggcttcgctaatcacgcgtgccgcagctgccgcataatctgcccgcgttgcactggcgattttgccatcgcccgccgcaccgataaatacgccgtgttccagtgctgccggggcgctggcgaggtagttttcgctgtaccagccgttgcgcagcagggtgtaaacgatgccagaatcagccagcattttctccgtctcgatgtgctcatcggcgaggccgagcggggaggtatctgcatgtagcaggctggtataagcgataaatttcacgccagccgcctttgcggcattaataacattacgatgctgcggggcacgttgacccacttcgctggaagagatcagcagtagtttttccactccctgaagtgcagatgtcagtgcggcttcatcgccgtagtcagcctgacgcacggtaatgccttgtgctgccagggcttgggcttttgccggattacgaacgatagccactatttggctggcaggaaccgttttcatcaaggattcaataacatagtgaccaagttggccagtggcaccagtaatagcgatcatgggaagtctccatcgttttgtcttgtgtttaaatacgctaacacctaaacttacttttagtaagtacgtacaaaaaggtaagtatgaaatgagtcaggttagcctgagccaacaactgaaagagggtaatctctttgcggaacagtgcccgagccgcgaggtgttgaaacacgtcaccagccgttggggggtgttgattctggtggcgctacgcgaaggtactcatcgctttagcgacctgcggcgcaaaatcggtggggtgagtgaaaagatgcttgcgcagagcttacaggcgttagaacaggatggttttcttaaccgtatcgcgtatccggtggtgccgccgcatgtggaatatagcctcacgccgctgggcgagcaggtgagcgaaaaggttgctgcactggcggactggattgagttgaatttgcccgaggtgttggcggtgcgggatgaacgtgcggcataactgccggatgcgctgagcttatctggtctacggtgcatggcttgtagggcggataagatgcgccagcatcgcatccgccaataaatgccggatgcggttgatgatttataggccgaaaaagaagtgttttacttactcaaatccacctgataaatcgcaaacccgatatcatcggtcgcgactttattcatcggatactgccctttctctttaataaacgctgcggctttatcactcggagaggtttcgaaacggatatccagtttcttatcgccagctatcggtgctaaacgccagttgttatctgccgccgggtgaatttcccccgcacgtttgctctcatcagcaatccacgctgccagcacgctgcggttctcatccggactagcaaaagcgatatggctgtcgcccgtaccggcaaatttgccgccgtaagcgcgatagttattggtggcaaccaggaacatggcgttcggatcaatcggcttgccattaaaggtcaggttcttaatcctttccgcattggcattaatcatctggcactcgccgtcataacgggcgggctgggtaacatcaatctgataattcacaccatcaataacatcaaagttataagtgcggaaaccatcccagttgatgagactctgtggtttcgtgctgttgggatcaatctggttaaactgtcccgcggagcactccagccactctttcacctctttaccgctggctttcaccacaatcagcgtattgggatagagataaagatcggcggcattacggaaggtcaactggcctttttccacctccacatagcttgccgggtcatttttgcgaccaccgactttaaacggtgcggcagcactaagcaccggcagttttgccagatccggatcgccctgaatgtaatgctcgacatacgctttttgcgcgttgttcaccacctgcacggtcggatcgtcctgcaccagcgccagatagctatacatattgtcggcagatttaccgattggcttgctgacgaactggcgtgtggcatcgtgatcggctttgagtgtttctaccagcttgctgtcttccgccgcgagggattttttattagcgatgtcgtaaatcggtcgtgcttccgctttcgcctgcgtcacctgccatttaccgctgtcattactgagttgtaagtcgaccacaccaagatgatcgccccacatgcctggcattaccgccggaacaccattcagcgtgcctttggcgatatcagccccttcgatatcagcaaaatctttacctgggaaaacggcgtgagcatggccaaacataatggcgttaacgcccggaatttcactgaggtaataaacactgttttccgccatcactttatacggatcggcagatagcccggaatgtgccagaacgacaacaacatcggcacctttctcgcgcatttcaggcacgtatttgcgcacggtttcggtaatatcattcaccgtcactttcccggataaattagctttatcccagcccatgatttgtggtggcacgacgccaatatagccaatcttcagcgtctgtttttttccgtctttatcgaccacttcggtgtctttaattaaatacggtgtaaacattggctgtttggttctggcgtcaatgacgttggcatttacataagggaatttcgctcctgccagcgcatttttcaggtaatccagaccgtagttaaactcgtggttgccaagcgttccgacggtatagtccagcgtatttaatgccttatagaccgggtgaatatcacctgcttttaatcctttcgcgctcatgtaatcggccagcggactcccctgaatcaaatcgccgttatcaaccagtacgctgtttttcacttcattgcgggcatcgttaatcaggcttgccgtacgtaccagtccgaatttttccgtggcggtgtctttgtaataatcgaaatccatcatgttgctatgcagatcagtggtttccatgatacgcagatcgaccgtcgctgcattcacactggcggcaatcagcgtggccaggagcgttgcgctaaacttaatcatcagggacatccttttatcatcgggaatacgaaagaaaagggagaataaacgtcttacttatagaacagtgaagaatgccacaattttacgctttgaaaatgatgacactatcacagttggcgcattcattaacgatagggtataagtaaaacaataagttaacaccgctcacagagacgaggtggagaaatgttagatcaagtatgccagcttgcacggaatgcaggcgatgccattatgcaggtctacgacgggacgaaaccgatggacgtcgtcagcaaagcggacaattctccggtaacggcagcggatattgccgctcacaccgttatcatggacggtttacgtacgctgacaccggatgttccggtcctttctgaagaagatcctcccggttgggaagtccgtcagcactggcagcgttactggctggtagactcgctggatggtactaaagagtttattaaacgtaatggcgaattcaccgttaacattgcgctcattgaccatggcaaaccgattttaggcgtggtgtatgcgccggtaatgaacgtaatgtacagcgcggcagaaggcaaagcgtggaaagaagagtgcggtgtgcgcaagcagattcaggtccgcgatgcgcgcccgccgctggtggtgatcagccgttcccatgcggatgcggagctgaaagagtatctgcaacagcttggcgaacatcagaccacgtccatcggctctagcctgaaattctgcctggtggcggaaggacaggcgcagctgtacccgcgcttcggaccaacgaatatttgggacaccgccgctggacatgctgtagctgcagctgccggagcgcacgttcacgactggcagggtaaaccgctggattacactccgcgtgagagcttcctgaatccggggttcagagtgtctatttactaaattcagatggcagaaacagtgtatttcctgattctgccatcctgatttctcccaacctaaaaagttataaataaaaagagattgtatttaaagtgcaaaaattcaattgctaataagttacattttaataatgagcgttttttgatagtttacttctatagtgagatatttaatggcgacataaagtaaccaaataaaataaggttgtcatatgttacccaggatcagacacaataattttattggtgcggtggagttatttgtaaagtctagctatacaaaaacacatagtaacaatttttttaacaacatccatcatgcatttaagaaaaaagattggattagcaattatgatagcctgttaactttgagggagttctttcgttgcgcaactcagattgataaaagtggttatcaggtgcttagtagtaaaaatgaaactgttcacgccatggataagtttcttatcagtttcagccttaaagataacggtgccgaatatacaatgacattgcgaggtagtggatttgaatacgaagaaatacccataacaataaatgaatataacagtttcatggatttcaaaaaccgtgaatttccgttagaacaaaacagacgattgtatgcccgggatattctacagaaaaaacagtctgacataccgaaaaggattaaaggttatattcaccaggcgattggtgacgtgtctttaggttatgccttattggaggatatagtaagcaaattaaaacggggtaaatttgaactccaaataccaggaggtggaattaaagaatgcgatggatggtatatttacgaaaaaataattgatgataattttgccatagtcatagaatctttgggctttgcgcttaaaatctatggaggggatgaacgttttcgtaatggttcctctgttgttttggaggatgaagattactctcttatttataattttctggttaatgcaggttgccaacaagtcgaattagccgaacaagtggatgcgatagtaagtgcgaatctggccgcagatagcgatattaccaaagaaaagatttgcgagaaatataaaagcaccattgaggcgtttaaaaaagagcaactagcgttaccagtattagttcggcgtaagaacagtgagacttaattcccctatcccatagataacgataggggaaaattatttttgcagaatttatgttattgccattatttgagcaacttttgcagcaggtccatcacttgctgcacctcttccggtgtgagcgccccgtctttggcccattgcacgcgaccatccttatccagcaccactacagcggaactttcttcatccagctgccaggcaccgagcgcgacgccattgctatcgacaataaactggctccagggataaagctttttattactctccagactgctgcgcacaaacatcccactacccggaatcgcgtcgtcggtgttaacaatggtggtggtctggtaacgatcgtgcggtaacttcgcacttttaatcgcttcaatcagcgtcgcgtttttctcttttgcagaggtgcgaccagcaatatgttgcagtactcgcacttttcccactaactgcgcgctgttccaggttttgtagctaaactgatctttatcaagcaccaactcgccccgatcggtaatgccaatcggcggcactcgctgaccggtttcgaactgatgtgcggaagccatcatcggcaacagcaggcaggtgagtgccagaatcttgcgtagggtcatggtgtttccttcttatgatatgcaggtgatccgaccacttgggtctgagttttaatcatatgtgctatttatcgaatttcccgcaagtgtgatgccagtttgcggtcaagcgcacaaatcatatgaaaaatgaatgcttatactgaagaccgcgcttcggtaaaaagataattctgaataattgtaacctttaggtaaaaaaagttatacgcggtggaaacattgcccggatagtctatagtcactaagcattaaaatttgcgcctcataatagttgggccgattgtggcaccgcacaggcgtaatactcagcaggagataacaatgaaaattttccaacggtacaacccacttcaggtggcgaagtacgtaaagatcctgttccgtggacggttatacatcaaggacgttggcgcttttgaattcgataagggtaagattcttatcccaaaagtgaaggataagctgcatttgagtgtgatgtccgaagttaaccgtcaggttatgcgtctgcaaacagagatggcttaaccaaagtgctatgcagtaaaaagtgctatgcagtaataagacggctcctgattcaggagccgttgatgtttctgggggttacgcgacgctttcttctttatctttagcgtcaggcagttttgggctaagggcggtggccttgctgtcgatccgggtcaccagcagctggtcgatgcggtagttatcgatatccaccacttcaaatttgtagccggcgaatttcacgctatcggtgcgtttcgggatcttacgcagcataaacatcataaagccgccgatggtttcgtagttgccgctctgcgggaactcgtcaatatccagcacgcgcatgacgtcgtcaattggggtgccgccgtcaatcagccaactgttctcatcacgggcgacaatctgctcttccagcccctgaccgaccagatcgcccatcagcgtggtcatcacgtcattgagggtgatgatccccaccaccagcgcgtactcgttcatgatcaccgcgaagtcttcacctgcggttttaaaactttccaacgcctcactaagggttaacgtatccggcacaatcagcgtgttgcgaatttgtacgccgctgttcagtgccaggctttggttagccagcacgcggttcagcaggtctttagaatcgacataaccgatgatgtggtcaatatcttcattacagacgaggaacttagagtgcggatgttccgccaccttattcttcaggctttgctcatcttcgtggagatcaaaccaaatcacgttttcacgcggtgtcatactagacggaacggtacgggattccagctcaaagacgttttcaatcagctcgtgttcctgtttacgtaacacgcccgccagcgcaccggcttccactaccgcgtagatgtcatcagaagtgatgtcatctttacgtaccattggcagtttgaaaatacggaagattatgttcgccaggccgttgaagaaccacaccagcggggtgcaaacgtacaggcagaagcgcatcgggttgatgatacgcaaagccacagcttctggcgcaatcataccgatgcgtttcggggttaaatccgcaaacaggataaacatgccagtcactaagctgaaagagagaataaagctcagttgctcagagagctctgcgctcatatagcgggagaacaggctgtgaaaagctggagaaaatgccgcatcaccgacgataccgccgagaatcgccactgcgttcagaccgatttggaccacggtaaagaacatgccgggattttcctgcatattcagaacgcgttgggcatttatattgccttcatcagccagcagtttaagtttgattttgcgactggcggcaaggctgatctcggacatgctgaagaacgcacttacagcgatcaagcagagtatgactaaaatactgtttaacatatcttatccgacctttcaggccagatcctcggaaggggaagttgattaatttgtgtgaaatacacattgaaagccgattcgaagaaagtgaaccggcattttcagtggctagtatagcgtaaggtactgtaaagccgccagagggttaaaattcagacagctgaaaaatgcaaaactgcctgatacgctatgccgatcaggcctacgcagtccttgcaatatattgaatttggacgattttgtaggcctggtaagtcgtttacgccgcatcaggcatagacaaagagcactttatcaacaaactacatttgtacccgtaacgttatgcttccggcggcagacagacgccaattccgccaattccacagtaaccatacgggtttttatgcagatattgctggtggtcatcttcggcataataaaacggtgtggcgttagcgatttccgtggtgatgtgacgatcgtcatcggcggcaagcatcgccgcctgaaaacgttccagactggcgcgagctgcggcatcctgttctggggtcagcggataaatcgcactacgatactgcgtgccgtggtcattgccctgacgcattccctgggcgggatcgtgattctcccaaaatacctgtagcaactgctcatagctgatgacggaaggatcgtaaacaatgcgtaccgcttcggcatgacccgtatcaccggagcacacttcccgataagtcggatttggcgtatagccgccggtatagcctgcggcggtgctgtaaacgccgggtaactgccagaacagacgctccacaccccagaaacaacccatcgcaaaaatggcaatctccattccgtcaggtacattggtcatactgtgaccgttgaccgcatgcagcgtggctacgggcatcggggtgttacgtccaggcagggcatcggcgggggaaaccagatgctttttatcaaataaactcatggtgtcgctctcccgaaaatcggtcattggggttaaggttgtaacaagaggcgtatttgcacacaataaccaccgtgaataggtctaaagtaaaacataagaaatatttggggtttagtctgctttttaatccatattactggatttttgttaagccgtttaacggcgttccaggggcaggaaaaaaggatattcaggagaaaatgtgcgctatatccgacagttatgctgtgtaagcttactctgcttaagcggatctgccgtcgccgcgaacgtccgtctacaggtcgaggggttaagcggacagctggaaaagaacgttcgtgcgcagctttctacgattgaaagtgatgaagtgacgccagaccgtcgctttcgcgcacgcgtcgatgatgccatccgcgaaggtctgaaagcgctgggttattaccagccgaccattgaatttgatctccgtccaccgccaaagaaagggcggcaggtattgatcgccaaagtcacgccaggcgtgccggtgttaattggcggcaccgatgtggtattgcgcggcggcgcgcggaccgataaagactatttgaaattgctcgatactcgcccggctattggcacggtactgaaccagggcgattatgaaaatttcaaaaagtccttaaccagcattgcgttgcgtaaaggttatttcgatagcgaatttaccaaagcgcagctgggcattgcgctcggcctgcataaagccttctgggatattgattataacagtggcgaacgttaccgctttgggcatgtgacctttgaaggaagtcaaatccgcgatgaatacctgcaaaatctggtgccgtttaaagagggcgatgagtacgaaagcaaagatctggcagaactgaaccgccgactttctgctaccggctggtttaacagcgtggtggtggctccacaatttgataaagcgcgcgaaacgaaagtattaccattgacgggcgtggttagcccgcgaacagaaaacaccatcgaaaccggggtcggttactctacggacgtgggaccgcgcgtgaaagcgacgtggaaaaagccgtggatgaactcttatggtcacagtctgaccaccagtactagtatttccgcgccggaacagaccctcgacttcagctataaaatgccgctgctgaagaatccactggaacaatattatttggtgcagggcggttttaagcgcactgacctgaacgataccgaatctgactccactacgctggtggcttctcgctactgggatctctccagcggctggcagcgtgccattaacctgcgctggagtctcgaccactttactcagggtgaaattaccaataccacgatgctgttttatcctggggtgatgattagccgcacgcgttctcgtggtggcctgatgccaacctggggcgacagccaacgctactctatcgactactccaacacggcctggggtagtgatgtcgatttctccgttttccaggcgcagaacgtctggatccgcacactgtacgatcgccatcgttttgttacacgcggcacgctgggctggattgaaaccggtgatttcgacaaagtaccgccggatctgcgtttcttcgccgggggcgaccgcagtattcgtggctacaaatacaaatctatcgctccgaaatacgccaacggtgacctgaaaggggccagcaagttgataaccggaagcctggaataccagtacaacgtgaccggaaaatggtggggcgcggtgtttgtcgatagtggcgaagcggtaagcgatattcgccgcagcgactttaaaaccggtaccggggtcggcgtgcgctgggaaagcccggtcgggccaatcaaactcgattttgccgtaccggtcgcggataaagacgaacacgggttacagttttacatcggtctggggccagaattatgagtttatggaaaaaaatcagcctcggcgtggttatcgttatcttactgttgctgggaagcgtggcgtttctggtgggcaccaccagcggcctgcatctggtatttaaagcggcggatcgctgggtgccaggactggatattggcaaggtcaccggcggctggcgcgatctcaccttgtctgacgttcgttatgagcagccaggcgtggcggtaaaagcgggcaatctgcatctggctgtcgggcttgagtgcctgtggaacagcagtgtttgtattaatgatctggcgctgaaagacattcaggtcaacatcgacagtaaaaaaatgcctccttctgaacaggttgaagaagaggaagatagcggtccgctggatctctccacgccgtatcccatcaccctgacacgggtggcactggacaacgtcaacattaagattgatgacaccacggtaagcgtgatggacttcacctccggcctgaactggcaggagaaaaccctgaccctgaaaccgacgagcctgaaaggcctgctgattgctctgccgaaagtggcggaagtggcgcaggaagaagtggtcgaaccgaaaattgaaaatccgcagccggatgaaaagccgctcggcgaaacgctgaaagatctcttttctcgcccggtattgccggaaatgaccgacgtgcatttgccgcttaacctgaacattgaagagtttaagggcgagcagctgcgcgtgacgggcgacacggacatcaccgtgagcaccatgctgctgaaagtgagcagcattgacggcaatactaaactggacgccctggatatcgattccagtcaagggatcgtcaacgccagcggcacggcgcagctgagtgacaactggccggtggacatcactctcaacagtacactgaacgtggagccgttgaaaggtgaaaaagtgaagctgaaaatgggcggcgcgctgcgcgaacagctggagattggcgttaatctttccggtccggtggatatggatttacgcgcccagacgcgactggcggaagccggattgccgctcaacgtggaagtgaacagcaaacagctttactggccgttcactggtgagaagcagtatcaggcggatgatctgaaactgaaacttaccggcaaaatgaccgattacacgctctctatgcgtacggcagtgaagggacaggagatcccgcccgcgactattaccctcgacgccaaaggtaatgaacagcaggtcaatctcgacaaactcaccgtcgcggcgctggaagggaaaactgaactcaaggcgttgctcgactggcaacaggccattagttggcgcggtgagctaacgcttaacggcattaacaccgccaaagagttcccggactggccgagcaaactcaatggcttgattaaaacccgcggtagcctgtacggcggcacctggcagatggacgtgccggagttgaagctgaccggtaacgttaaacagaacaaagtgaacgttgacggcacgctgaaaggcaacagttatatgcagtggatgatcccagggcttcatctggaactcgggccaaacagtgccgaagtgaaaggcgagctgggggtaaaagatctcaatcttgatgccaccatcaacgcgccggggctggataacgcgctgccggggcttggcggtacagcgaaagggctggtgaaagtacgcggcacggtggaagcgccacaactactggcagatatcaccgcgcgcggcctgcgctggcaggaactttccgtggcgcaggttcgcgtggaaggcgatatcaaatccaccgatcagatcgccgggaaactcgacgtacgcgttgagcaaattagccagccggatgtaaatatcaacctcgtcaccctgaatgccaaaggcagcgaaaagcagcacgagctacagttgcggattcagggggagcctgtctccgggcagcttaatctggcaggaagttttgatcgcaaagaagaacgctggaagggaactcttagcaatacccgcttccagacgccggttggcccgtggagcctgacccgcgatattgcgctggattaccgcaataaggagcaaaaaatcagcatcgggccacactgctggcttaacccgaatgcggaactgtgcgtgccgcaaactatcgatgcgggggccgaagggcgtgcggtggtgaatctcaaccgcttcgacctcgccatgctgaaaccgtttatgccagaaaccactcaggccagcggtatcttcacgggtaaagcggacgttgcctgggacaccacgaaagaggggctgccgcagggcagtatcacccttagcgggcgtaacgtgcaggtaacgcaaaccgtcaacgatgcggcgctgcccgtggcgtttcagacactgaatctgacggcggaattgcgtaacaaccgtgccgaattgggctggaccatccgcctgaccaataacggccagtttgatggacaggtgcaggtgaccgatccgcaaggccgccgtaatcttggtggcaacgtcaatatccgtaacttcaaccttgcgatgataaaccccatctttacccgtggggaaaaagcagcggggatggtgagtgccaacttgcgtctgggtggtgatgtgcaaagcccgcagttgtttggtcagcttcaggttacgggtgtggatatcgatggcaactttatgccgtttgatatgcaaccgagccagcttgcggtcaactttaacggtatgcgcagcacgcttgccggtacagtacggacccagcagggtgaaatctacctgaacggtgatgccgactggagccaaattgaaaactggcgggcgcgggtaacggcgaaaggcagtaaagtgcggatcaccgtgccgccgatggtacgaatggatgtaagcccagatgttgtattcgaggctacaccaaacctgtttaccctcgatggtcgcgtggatgtcccttgggcgcgcatcgtggtgcacgatctgccggaaagcgcagtaggcgtctccagcgatgtggtgatgcttaacgataacctgcaaccggaagagccgaaaacggcgagcattccgattaacagtaacctgattgtccacgttggcaacaatgtgcgcattgacgcctttggcctgaaagcgcggctgacgggcgatctcaatgtcgttcaggacaaacaagggctgggtctgaacgggcagatcaacatccctgaagggcgcttccatgcctatggtcaggatctgattgtgcgtaaaggtgagttactgttctctggtccgccagatcaaccgtatcttaatattgaagctattcgtaacccggatgctacagaagacgacgtaatcgccggagttcgcgtcactggtctggcggacgaaccgaaagcggagatcttctctgacccggcgatgagccaacaagctgccttgtcttatttgctacgtggacaagggctggagagcgatcagagcgacagtgcggcaatgaccagcatgctgattggtttgggggttgcgcaaagtggccagattgtgggtaaaatcggcgagacgtttggcgtaagcaatttagcgctcgacacccagggagtaggcgactcctcccaggtagtggtcagcggctatgtattgccaggtctgcaagtgaaatacggcgtgggtatatttgactctatagcaacactcacgttacgttatcgcctgatgcctaagctatatctggaagccgtgtctggtgtagaccaggcactggatttgctctatcagttcgagttttaacaatgcgaatatttgtctacggcagtttacgccacaaacaaggcaacagtcactggatgaccaatgcccagttactgggcgatttcagtatcgataactaccagttgtatagcctgggccactatccaggcgcagttccggggaacggaacggtacacggtgaagtttatcgtattgacaacgccacgctggccgaacttgatgccttgcgcaccaggggcggtgaatacgcgcgccagttgattcagacgccgtacgggagtgcatggatgtacgtttatcaacgacccgtcgatggattaaagctaattgaaagcggcgactggttagacagggataagtaaccatatgcatacgccaccttcgggtggcgttgttttttgcgagacgactcgcattctgttttgtaattccctcaccttttgcttttctctccgagccgctttccatatctattaacgcataaaaaactctgctggcattcacaaatgcgcaggggtaaaacgtttcctgtagcaccgtgagttatactttgtataacttaaggaggtgcagatgcgtattaccataaaaagatgggggaacagtgcaggtatggtcattcccaatatcgtaatgaaagaacttaacttacagccggggcagagcgtggaggcgcaagtgagcaacaatcaactgattctgacacccatctccaggcgctacagccttgatgaactgctggcacagtgtgacatgaacgccgcggaacttagcgagcaggatgtctggggtaaatccacccctgcgggtgacgaaatatggtaaagaaaagtgaatttgaacggggagacattgtgctggttggctttgatccagcaagcggccatgaacagcaaggtgctggtcgacctgcgcttgtgctctccgttcaagcctttaatcaactgggaatgacgctggtggcccccattacgcagggcggaaattttgcccgttatgccggatttagcgttcctttacattgcgaagaaggcgatgtgcacggcgtggtgctggtgaatcaggtgcggatgatggatctacacgcccggctggcaaagcgtattggtctggctgcggatgaggtggtggaagaggcgttattacgcttgcaggcggtggtggaataaggtgtgtttatttatcgcgggcataaaaaaacccttactaaccgaagcccggcgttcagggttattacgccagaagaacttatttattctttgcgcgctcgaaggaggcaacgatttcagctttagcggcttctgcgttttcccaaccttcaactttcacccacttgcctttttcgaggtctttgtagtgctcgaagaagtgagcgatttgcgctttcagcagttcaggcagatcgttaacgtctttaatgtgatcgtattctttgctcagcttgctgtgcggaaccgcaaccagtttcgcatcttcaccggcttcgtcggtcattttcagaacgccaaccggacggcaacggatcacagaacccggctgcagcgggtacggagttgggaccagtacgtcaaccgggtcaccgtccagagacagggtgtggttgatgtaaccgtagttgcatggatagaacatcgcggtggacatgaagcggtcaacgaacagtgcgccgctctctttgtcgatttcgtatttgatcggatctgcgttagccgggatctcaataacaacgtagatgtcttccggcagatctttacccgcagggacgttgagtaagctcatgtctgtttcctttaaaaatatgtggcaaacaagtgccgagtattatagccaactcgcgccgaatgtcttcgcttgttttcgtcttcattttcctttttcaccagttttaagacggtatacagagcaggaaaatccataaccgtagccgcatttttcatagtgagatgaaagcgattacaaacttgtgattaacgttttatttacttttttgaagtgtgatgtaacgcaatctgttacataacgaattgtctatagttttttcgcgaacatcttttaaccaataataactaccccgacgaggacaaccctatgtggaaacgcttacttatagtctctgcagtcagcgcagccatgagctctatggcgttggccgctccattaaccgttggatttagccaggtcggaagcgaaagtggctggcgtgccgcagaaaccaatgtggcgaaaagtgaagccgaaaagcgcggaatcacgttgaaaattgccgatggtcagcaaaagcaggaaaaccagattaaagcggtacgttccttcgttgcacaaggggtggatgcgatctttatcgctccggtggtcgcgacaggttgggaaccggtattaaaagaggcgaaagatgccgaaatcccggtattcttgctcgatcgttccattgatgtgaaagacaaatctctctatatgaccaccgtcactgccgacaacatcctcgaaggcaagttgattggtgactggctggtaaaagaagtgaatggcaaaccatgcaacgtggtggagctgcagggcaccgttggggccagcgtcgccattgaccgtaagaaaggctttgccgaagccattaagaatgcgccaaatatcaaaatcatccgcagccagagtggtgacttcacccgcagtaaaggcaaagaagtcatggagagctttatcaaagcggaaaacaacggcaaaaacatctgcatggtttacgcccataacgacgacatggtgattggtgcaattcaggcaattaaagaagcgggcctgaaaccgggcaaagatatcctcacgggttccattgacggtgtaccggacatctacaaagcgatgatggatggcgaagcgaacgccagtgttgaactgacgccgaatatggcaggtcccgccttcgacgcgctggagaaatacaaaaaagacggcaccatgcctgaaaagctgacgttaaccaaatccaccctttacctgcctgataccgcaaaagaagaattagagaagaagaaaaatatggggtattgagggttgctatgcctgatgccgattcgtaggccggataaggcgctcgcgccgcatccggcgatggtgcactgaagcctgatgcgacgcttaccgcgtcttatcatgcctactgggagcacgctttacaccgggggaaaccatgacgaccgaccaacaccaggagatcctccgcaccgaaggattaagtaaatttttccccggcgtcaaagcgttagacaacgttgatttcagcctgcgccgtggcgaaatcatggcgctgctcggtgaaaacggggcgggaaaaagtacgctaatcaaagcattaactggtgtataccacgccgatcgcggcaccatctggctggaaggccaggctatcagtccgaaaaataccgcccacgcgcaacaactcggcattggcaccgtctatcaggaagtcaacctgctacccaatatgagcgtcgctgataatctatttataggccgcgaacccaaacgcttcggccttctacgccgcaaagagatggaaaagcgcgccaccgaactgatggcatcttacggtttctccctcgacgtgcgcgaaccgctcaaccgctttagtgtcgcgatgcagcaaatcgtcgctatttgtcgggctatcgatctctctgccaaagtgctgatcctcgatgaacccaccgccagtctcgacacccaggaagtggagttactgtttgacctgatgcgtcagttgcgcgatcgcggcgtcagcctgatttttgtcactcactttctcgatcaggtctatcaggtcagcgatcggatcaccgtcttacgcaacggcagtttcgtaggctgtcgggaaacgtgcgagctaccgcagatcgaactggtaaaaatgatgctggggcgcgagctggatacccacgcgctacagcgtgccgggcgaacattgttgagcgacaaacccgttgccgcgttcaaaaattacggcaaaaaaggaacgatcgcaccgtttgatctcgaagtacgccccggcgagatcgtcggtctggctggattgctgggaagtggacgtaccgaaaccgccgaagtgatcttcggtatcaaacctgctgacagcggcacggcgttgatcaaaggcaaaccgcaaaacctgcgaagcccacatcaggctagcgtactgggcattggcttctgcccggaagacaggaaaaccgatggcatcatcgctgccgccagcgtgcgggaaaatatcatcctcgctctccaggcccagcgcggctggctacgtcccatttcccgcaaagaacagcaagagattgccgaacgctttatccgccagcttggcattcgcacacctagtactgaacaaccgattgaatttctctccggcggcaatcagcaaaaagtgttgcttagtcgttggctactgacccgaccgcaatttctgatcctcgatgagccaacccgcggcattgatgttggtgcccacgccgagatcatccgcctgattgaaacgctatgcgccgatggtctggcgctgctggtgatctcctccgaactggaagagctggtgggctatgccgatcgggtgattatcatgcgcgatcgcaaacaggtggcggagatcccgctggcagagctttccgttccggcgatcatgaacgccattgcggcgtaaggagaacagtgtgatgcctcaatctcttccggacaccactacgccaaaaaggcgctttcgctggccgacggggatgccgcagctggtagcactgttgctggtgctgctggtcgatagcctggtagccccgcatttctggcaggtggtgcttcaggatgggcgtttgttcggtagccccatagacattcttaaccgtgcagctcccgttgcgttactggcgattggcatgacgctggtgatcgccaccggtgggattgatctctccgtaggggcggtgatggctatcgccggagccacaacggctgcgatgacggtcgcgggattcagcctgccgattgttttgttaagcgccctgggcaccggcatcctggcgggattgtggaacggcatactggtagcgatcctcaaaattcagccgtttgtcgccactctgatcctgatggtcgccgggcgcggcgtggcgcaactgatcaccgccgggcagatcgtcacgtttaacagcccggatctcagttggttcggcagtggaagcctgttgttcctgccaacgccggtcattatcgcggtgctgacgcttatcctgttctggctgttgacccgcaaaacggcgctggggatgtttatcgaagccgttggtatcaacattcgggcggcaaaaaatgccggggtaaacacgcgaatcatcgtcatgctcacttatgtgttgagcgggctgtgtgcggcgattgcgggcattatcgtggcggcggatattcgcggtgccgatgccaacaacgctgggttatggctggagctggacgccattctcgcggtggtgattggcggcggaagcctgatgggcgggcgctttaacctgctacttagcgtggtgggggcgctgattattcaggggatgaacaccggaattttgcttagcggctttccgccagagatgaaccaggtggtgaaagcggtggtggtgctttgcgtgctgattgttcagagccaacgctttatcagtctgattaaaggagtacgtagccgtgataaaacgtaatttgccactgatgatcaccatcggcgtctttgtgttgggttatctttactgcctgacccagtttcccggttttgcttccacaagagtgatctgcaatatcctgaccgataatgcctttcttgggatcattgccgttggcatgacctttgtgatcctcagtggtgggatcgatctctccgtcggtagcgtgatcgcctttactggcgtgtttctggcaaaagtgattggcgatttcggcctcagcccgctgctggcgtttccgctagtgctggtgatgggctgtgccttcggcgcatttatggggcttctgatcgacgccctgaagatcccggcatttatcattacgcttgcggggatgttctttttgcgcggcgtcagctatctcgttagcgaagagagcattccgataaaccatcccatttatgacacgctcagtagccttgcgtggaaaatccctggcggcggtcgcttaagtgcgatgggactgctgatgttggcggtggtggttatcggcatattcctcgcgcatcgtacccgttttggtaatcaggtatacgccattggcggcaacgcaacgagcgcgaatctgatggggatttccactcgcagcaccactattcgcatttatatgctctccaccggactggcaacgctggcggggattgtcttcagcatttatacccaggccggatatgcgctggcgggcgtaggtgtggaactggatgctatcgccagtgtggtaattggcggtacgcttttgagcggtggcgttggaacggtattagggacgctttttggcgtggcgattcagggactgattcagacttacataaactttgatggcacgctgagttcctggtggacgaaaatcgccatcggtattttgttgtttatttttatagcattacagcgtggattaacggtgctgtgggagaatcgtcagagtagcccagtgacaagagtcaacattgcgcagcaataaaaacgcctctccgtgtggagaggcgcaggagattacgcgtccgggaactcacggataaagcgttcgacatcttcaaccatatggtcgttgccgacaaagaaactacggcgctggtgcagggtttccgggatgatatccagaatacgctctttgccatcgctcgctttaccgcccgcttgttccgccaggaatgccatcgggttgcactcatacagcaaacgcagtttgccgtccgggtggctggcggtgcttgggtagagataaataccgcctttcagcaggttacggtggaaatccgcgaccagactaccgatataacgactggtataagggcggttggtggatttatcttcttcctggcagaatttaatgtacttcttcaccccgttcggaaacttaatgtagtttccttcgttgatggagtaggttttgcctttctccgggaagcgcatccgttcctggcacaggcagaaaacgccgaggctaggatcgtaagtaaaggcgtgaacaccgcatccggtggtgtaaaccagcatggtagaggagccgtataccacgtaacctgccgcaacctgtttgttaccaggctggaggaaatcttcttccgttaccggcgtgccaacaggcgtaacgcggcggtagatggagaaaatggtaccgacagagacgttaacatcgatgttggagctgccatccagggggtccatcagcaccacgtattttgcgtgttcacagccttcaaagacgacaatctcatcttcttcttcagaggcaatgcccgcaacgatatcgcgtgctttcagtgcggctttcagtttttcattagcgaacaagtcgagtttctgctgaacctcgccctgcacgttctcagcaccgctggcacccaggatatcaaccagtcctgctttgttgatatcgcgatggataatcttggcgcccagttttattgcgctcagcaaagcagtgagctcaccggtagcatgagaaaactcgtgctgcttttcgacaataaattcacctaacgttttcataaaactttccctgcaatgtttatggagtaaagcgaccgcaacaatcttaacaaataatctcaatgttgcgctcaggtgaatcgcgccagcaaattacggattatcctgaaatgcgtttctcacttgcccgacatatgcgtaaaatgagcggcagattaaaaaaggatagtgacgtatgcgcattcatattttaggaatttgtggcacatttatgggcggtctggcgatgctggcgcgccagttaggccatgaagtaacgggtagcgacgccaatgtgtatccgccgatgagcaccttacttgagaagcaaggcattgagctgattcaggggtacgatgccagccagctcgagccgcagccggatctggtgattattggcaacgccatgacccgtggaaatccgtgtgtggaagcggtactggaaaaaaatatcccttatatgagtggtccacagtggctgcacgattttgtgctgcgcgaccgctgggtgctggccgttgccggtacacacggcaaaaccaccaccgcgggaatggcgacctggattctggaacagtgtggttacaaaccgggctttgtaatcggcggtgtgccggggaactttgaggttagcgctcatctgggcgaaagcgacttctttgttatcgaagcggatgagtatgactgcgccttcttcgacaaacgctctaaatttgttcattactgcccgcgtacgctgatcctcaacaaccttgagttcgatcacgccgatatctttgacgacctgaaagcgatccagaaacagttccaccatctggtgcgtatcgttccggggcagggccgtattatctggccggaaaatgacatcaacctgaaacagaccatggcgatgggctgctggagcgagcaggagctggtgggtgagcagggtcactggcaggcgaaaaagctgaccaccgatgcttccgaatgggaagttttgctggatggcgaaaaagtgggcgaagtgaaatggagcctggtaggcgaacataatatgcacaatggcctgatggcgattgcagcggctcgccatgttggtgtagcgccggcagatgccgctaacgcgctgggtagctttattaatgctcgtcgccgtctggagttgcgtggtgaagcgaatggcgtcacggtatatgacgattttgcccatcacccgacggcgattctggcaacgctggcggcgctgcgtggcaaagttggtggtacggcgcgcattattgctgtgctggagccgcgcagcaataccatgaaaatggggatctgcaaagacgatctggcacctagtttaggtcgtgccgatgaagtcttcctgctgcaaccggcgcatattccgtggcaggtggcagaagtggcagaagcctgcgttcagcctgcacactggagtggcgatgtggatacgctggcagatatggtggtgaaaaccgctcagcctggcgaccatattctggtgatgagcaacggcggttttggtgggatccatcagaaactgctggatgggctggcgaagaaggcggaagccgcgcagtaattcggccttagccagatatagtatgcgtaggccggataaggcgttcacgccgcatccggcatttgagcatagtgcctgatgcgacgcttgatgcgtcttatcaggcctacaggtgcaccgtatccggcaaaccatactcacatcaacaacgaaaattacccttcgttctccgctaactcgcgcagatactggaaaatctggcgtgcggatttcggcggcttattcccttctttctctttcttcgcgttgcggatcagagtacgcagttgctgacgatcggcatcgggccacagatttaatacctcagcgatggcgtcatcaccttgatcgatcagacgatcgcgcaggttttccagtttatggaacagcaccacctgctggttgtgacggtttttcagcttatccagcgcctgacgaataggctctacgtcgcgctggcgcagcatcttaccgatgagctgcaactggcggcggcgaccttccatcttaatacgctgggcgagctcaatagccgcgcgcagatccgcatctaacgggatcttatccagcgcgtttttccccagatcaacaatttccgcgccaaggcgttttagctcctcggcatcacgtttaatttcacttttactgacccagataatttcatcgtcttcgtcttcgatgtcatcaccgggaacgtcgtcgagccagtcttcgggctgcttagtcatctcaggctccttaaaaaaagaggctaatgttaccagttaagatgcgcactgaaaaacggttctctgttagacttcagagaaactctctacattatggcacttgcaatgaaagtaatctctcaagttgaagcgcagcgcaagattctggaagaagcagtttccactgcgctggagttggccagtggcaaaagcgacggtgcggaagttgccgtcagcaagaccaccggcattagcgtaagcacgcgttatggtgaagtggagaatgttgaattcaatagcgatggcgcgctggggatcactgtttatcaccagaaccgcaaaggtagcgcaagttccaccgatttaagcccgcaggccattgcccgtactgtacaggcggcgctggatattgcccgttataccagcccagatccctgtgccggcgtggcagacaaagagctgctggcctttgacgcaccagatctcgacttgttccaccctgcggaagtttccccggatgaagccattgaactggcggcccgcgcagaacaggcggcattgcaggcggacaaacgcatcaccaataccgaaggtggcagctttaacagccactacggtgtcaaagtttttggcaacagccacggcatgttgcagggttactgcagtacgcgtcatagcctctccagctgtgtaattgccgaagaaaatggcgatatggagcgtgattacgcctacaccattggtcgtgcgatgagcgatctgcaaacgccagagtgggttggggccgactgtgctcgccgtactttaagccgtctgagtccgcgtaaactctccaccatgaaagcgccagtcatttttgccaatgaagtggcaaccgggctttttgggcatctggtgggggcgatagcgggtggaagcgtttatcgtaaatctaccttcctgctggatagcctgggtaaacaaattctgccggactggctgaccattgaagagcatccgcatctgctgaaagggctggcgagcacgccattcgacagcgaaggtgtgcgcaccgagcgtcgcgatattattaaagatggcatcctgactcagtggctgctgaccagctacagcgcgcggaaactggggctgaaaagcaccggacatgcgggcggtattcacaactggcggattgccggacaaggtctaagcttcgagcagatgctcaaagagatgggcaccgggctggtggtgacggaattgatgggccagggcgtgagtgccattaccggtgattattcccgtggtgcagcgggcttctgggtagagaatggcgaaattcagtatccggtgagcgaaatcaccatcgcaggtaatttaaaagatatgtggcgcaatattgtcaccgtcggtaacgatattgaaacacgcagtaatatacagtgtggttctgtgctgttgccggagatgaaaatcgccggacagtaaaaaaactggcgcgacctgccgcgctataaactaaaaaattacacaaaatcattcgcactgcatcgagacggaaagtgaatgagggccggggagcgtactcgcagtacgtgacccggtcgaatgagcgtagtcgtcgatgaggcagtgtgaaggatgaagtgtaaataaaaaaggaactattcttgcagtctcctcgttggtattcagttcggcgtcatttgctgctgatctcgaagacaatatggaaaccctcaacgacaatttaaaagtggtcgaaaaagccgataacgcggcgcaagtcaaagacgcgttaacgaagatgcgcgccgcagcgctggatgcgcaaaaagcaacgccgccgaagctcgaagataaaagtccggacagcccggaaatgaaagatttccgccacggtttcgacattctggtcggtcagattgacgacgcgctgaagctggcaaatgaaggtaaagtaaaagaagcgcaggctgctgcagagcaactgaaaacgacccgcaatagttatcacaagaagtatcgttaattcctcatttccctgttgcctgcactcaggtaacagggaacttatcatcgcaaatgatgcaccacctgattgctgctgccgcgccagatcagggaagggtcttttaaatcctgcacaaatttgccgtcgaccagcacgttaatcaaatcaacaacctgcatttgcgcagcgttgagttcgtcgagtttatagcctgtccacacccagatgtctttacccggacactcggcgcggatgcgttgtaccagtttcagaatatccggcacgttttgcggatgcagcggatcgccgccggagagggaaataccctggcgtttgatacgagtgtcattcagatcgttaatgatctggtcttccattgctttggtaaatggctgaccggaatttacccgccatgtgcttttgttatagcaaccggggcattcatgaacacacccggagacaaacagggtgcaacgagtgccggggccgttgacgatgtcgacaggatagtactgatgataattcattatttcgcctggcttatcagtccgcgtgtaggctgcatccggtaatcaatgcctgatgcgacgctgtcgcgtcttatcagacctggagcaattgccaaatgtaggccggataaggcgtttacgccgcatccggcatttgcttagctcagagtgaagattaacctatctgcccattccccaaatgtttaacgcggcgcttaacttcttcctgcttaccagcgttaaacggacgtgcatccgggctacctaaatatccgcacacgcggcgagttacgctcacacgggaggcgtcatggttaccacatttcgggcaagtgaagcctttgctggtgcactcgaactcaccggtaaagccacactcgtagcactcatcaatcggtgtattggtgccgtaatacggtacatgctgatagctgtaatcccagacatcttccagcgccttcaggttgtgctgaatgtttggatactcgccgtagcaaatgaaaccaccgttcgccagcggcgggtaaggcgcttcaaagtcgatcttgtcgtacgggttcaccttcttctccacatcgaggtggaaactgttggtgtagtaacctttatcggtcacgcccggcaccacgccaaactcagcagtatcgagacggcagaagcgatcgcacaggttttcactcggcgtgctgtagagactgaaaccataacccgtttcttctttccactgatccactgcctgacgcagacgttcaacaatggcgatacctttcgcgcgaagctgctcgttgtcgtaaacatgctcgccgccgaacagcgcgttaatggtttcgtggatgccgatgtaacccaggctaatagacgcacgaccgtttttgaagatttcagaaacatcatcgtcagcattgagacgcacgccacaagcaccttccatatagaggatcggggccacgcgcgctttcacgccttcgagacgagcgatacgggtcatcagcgccttacgtgccagcaccagacgttcatccagcagcttccagaaggtggcttcatcgccttttgcttccagagcaatacgcggcaggttcaggctgatcacgccgaggttgttacgaccatcgtggatctgctcgccgttttcattttcccacacgccgaggaagctgcggcagcccatcggagttttaaagctaccggtgactttcactacctgatcgtagttcaggatatccggatacatgcgcttgcttgcgcactccagcgccagctgtttgatgtcgtagttcggatcgccttttttatggttcaggccatcgcgaatcgcaaacaccagtttcgggaacaccgcagttttacggtttttaccgaggcctgcgatacggttacgcaggatgctttcctgaatcaggcggctttcccagctggtgcccaggccaaaaccaaaggttacaaacggcgtctgaccgttggcggtgtgcagggtgtttacttcgtactccagactctggaaggcatcgtagcactctttgatggttcgagagttagcgtagccttcggcgtccgggatgttccactcttctgcggtcttgcgatgtttgttgtagctggcagtgacaaacggtgccagcacttcatcgatacggttaatggtggtgccgccataaatatggctggcaacctgagcaataatctgcgcagttaccgcggttgccgtagagatgctcttcggcggttcaatctcggcgttccccattttaaagccctgggtcagcatgcctttcaggtcgatcaacatgcagttgaacatcgggaagaacggactgtaatcgagatcgtgatagtgaatatcgccacgctcatgtgcctgcaccacgtcacgcggcagcaggtgctgacgtgcatagtgtttagccacgatcccggccagcaggtcgcgctgggttggaatcaccttgctgtctttgttggcgttttcgttgagtaagctggcgttggtctgctcgaccagaccacggatctcctggttcaggcgaccgcgtttttcacgttcaatgtcgcgatcgtgacggtactcgatgtaagcacgagccagttgtttgtatggaccactcatcagctgattttcaactgcggtctggatctcattgatatccacctggttgcggccctgcatctgctcgctgacaaccgcggcaacagtggcgcaataatcggcatcatcgacttccgctgctttagctgcacgcagaatcgcttctttgatgcgctcacttttaaacggcactttgcagccgtctcgtttcatcacatgcggtgtcatgatcgctccatatttttaagaacaggttatccacagaaattgggaaaggcgttttccggttttttcgtttcgttttccggtgctttccgcaatcgccatccgcttatccacaacgccgcacctttttcgtggggagctgtagtagcaattatagtcgattaatacaacatattgggttgggacgcattttaaagtctatatatagtgctttgcatcaaggatgtttgagctttttttgatgtagctcaaagtaaaaagcagagcgtacggatgacgggcgctacagcgatatgtaaattttttaatgaatttgctggttgaaaaatcaacaaaaacaacatactgacagacaaaaccccggaatgaccggcattaccggggcttagggaagatttacttctgtaaccaccagacagcctcaaaaggccgtaaattcatggcacagggttgtggactggcttcttcgtagttatgcatcacaagctgccagttgccgcgcatttgccctgcctgccagggttggatctcacggctaaggttggcaatgaccagcaaggtttgccccttccattcacggcgatagcaccacaatacagggctgtttggcagcagatcctggtaattgccccatgtcaggatggcttcctgcttacgcagtgcgattaacttttggtaggtgtaaaacacgctggaatcatcggccagcgcggcttctacgttgatttgttgatagttatcgcccaggccaatccacggttcgccagccgtaaacccggcattatcgccgttgctccattgcatgggcgtgcgactgttgtcacgggatttactggcgaggattgccaataactcgtcggcatcacgcccatcgttgcgcagctcggcaaacatattgaggctctctacgtcgcgatagtcagtaatgcgcgtgaaatgcgggttggtcatgccaatctcttcgccctggtagatatacggcgttccctgcatgccatgcagcaccatcgccagcatttttgccgcaggcacgcggtattcaccttcatcaccaaagcgagaaacaatgcgcggctgatcgtggttacaccagaacaaggcattccatgctacgttgtgcattccttgttgccagtggcggaacaatgttttcaacgccacaaagtcaggtttagccagcgtccatttttcaccaccgggataatcgaccttcaggtgatgaaaattaaaggtcatgctcaattcactgcctgtcagagccgcgtatcgctggcaatgctcaaggctggtggaggacatttcacctacggtcattaacccgcgtggcgtaaacacatcgcggttcatctcgtgcaaaaactcgtgtgctcgtggcccgtcggtgtagaagcgacgcccgtcgccgtccaggtcttcagggaaacgcgggtctttggagatcagattcaccacatccaggcgcaacccgtcgaccccacgatcggcccagaactcacagacttttttcagctctgcgcgtaccgctggattctcccagttgagatccgcctgttctggtgcaaagagatgcaaatagtactgttcgctttccgcatgccagcgccacgcactaccgccaaatttactacgccagttgttcggtggcgtttctggttctccatcgcgccagatataaaactggcggtaagggctttctttgttcagcgcctcgcgaaaccaggcatgttgggtagaggtatggttaaacaccatatcgagaatgatacgaatcccgcggctttttgcctgcgtcaccagttcgtcaaaatcgtccagcgtgccgtaggtgggatcaatcgccgtatagttcgctacgtcgtaaccgttatcgacctggggagagacataaaagggggttagccagatggcatcaacgcccagtttatgcagatagtccaggtgttggataacgccacgtaaatcgccggtaccgctacccgtggtgtcctgaaaactctttggataaatctggtagataacgccgttttgccaccagtggggaagatgagtcattacgttattcctgcgaatgcgagggggcgcaattgcgccccgaagaaaattaaacaatgtccagcgtgcccaggcggtatttccgctgatagataaagctggtgagtacaatcgggatgatgatggcgatagccattgccagcgcaaacacctgccagtagctcggttgaatgctgagaattcccggcaggccgcctacgccgatgccattcgccataacgccgttcaggccgcatagcaatcctgccagaccagaaccaatcatcgcgcacagcatcgggaagcgatatttcaggttgatgccgtacattgcaggctcagtgaccccaagccaggcggagatagcggcaggcacggagatctcgcgttcattgtgcttgcggctggaaatgataatgcctatcacggcggagccctgagcgatattgctcagcgcaatcagcggccacactggcgtaccacccatgctttgaatcatctgcaaatcaatagcaagcgtggtctggtgtacaccggtgatcaccagcggggcgtacaggaagccaaacaatgctgcgccaatcggagcaaagctgccggtcatcaggtgacgtaccgcaaaggcaacgccatcgccaatcatgcgaccaaacggaccaatcagcgcatgggcgaggaacaccgcgaggatcaggctacagacgggtaccaccaccagatagaggtaatccggcacgatgcgtttaaggcgagtttcaataacgcccagcgccagtccggctaacagtgccgggatcacctgcgcctgatagcctactttggcgatgctgaacatgccaaagtcccacacttccggcagctgctgcccgagcagataagcgttcatcagctgtggagaaaccagtgtcacgccaagcacgataccaaggatcggcgtgccgcccatttttttcaccgcactccagcaaataccgaccggcaggtagaagaagatcgcttcaccgatcaaccacagaaaatcgtagatcgtttgcagggaagggtacatttgcgccagcgtctgaccgttgctcatgggcaaatcgccgatcacattgcgaaaaccgaggatcaaaccgccgctaatcaacgcgggcagcaacgggaagaagatcaccgcgaaatgagagatcaactgctcatgccatttcatattatgccgggcggctttttttacctgctctttatcaacctgcgcctgtccggtactcgcaatcagtgcttgatagtaatcacccacgttggtgccaatcaccacctgaaattgcccggcattggtgaaacagcctttcaccatagggagttgctcaatttctttcggtctggcattggccggttggttgaggacaaagcgtaggcgagtaatacagtggctcaccgtcgcaatattgccgcgcccgccgaccagttcaatcaaccgatcgatatccgtttggtttattttgctcatcataaagccccatggcagatgacatttttggttggctgcagaatatattgcgcggaaaaatttaaaaacgggaacgttcccgaaacgcagcgaagatcacaatttatcgttcaggaaacgatcaggacagggtggcggggatgatgatttgttgcggttcgctgcgcccggttacctgcgcgatcaactggcaagccgcctggcgtccagcttcggcgtaaccgggatctacggttacgatctccggatggaggaatttcattaacggcgtattaccgacgctcgccagttgcaaggtgtcgatgcgttgctcttgcaggtatttacttgcgccaagtgccagcgtgtcggttgcgcacagtaaggcggtagtttcaggcgtaatcacttttgcaacgttctcatagccttgcttcatagcaagccctggcagggcggcaacgggatgcagtttatgcgctttgcagaacgccaggtaggcttcgtgacgtcgcttaccggttgtcacgtcactgtgcggcacgccgagataactgatattacgatgcccctggtcatacagccgttgcatcaggattttgattgccccttcgtcgtcataacagacgctagcaaagccttttgcgtcacgcgccagcagaaccaggctactctgccagtgggctaacatttcttctgttatgccagtaaaaccgaacagcactacgccgtcgatattacgccgtttcagcactcccaaatgttcggcaactaattgcggggaaaactgactttccatcatgattgggtcgtaaccttgttcatagaacgctggcagcatggtttgaacggcgagattttcactcaagctatccagacgggtaacaatgatggcgaccactttatcgctttgcccacgcatagcgcgcgcagagcgggaaggggaaaatccatgctgattcatcactgcttcaacacgctcgcgggtgagctggctcacgccgctttcgttattcagcacccgggaaactgtagatttccccacgccgcttaagcgcgcgatatctttgatggtcagccgattttgcatcctgttgtcctgtaacgtgttgtttaattatttgagcctaacgttacccgtgcattcagcaatgggtaaagtctggtttatcgttggtttagttgtcagcaggtattatatcgccatagatgctacgaatattattggattctccttattatttgcggcgcttttttcacttaccggaggttatatggaacctgatcccacgcctctccctcgacggagattaaaacttttccggtaagcccgtcttttcacggcgttaccggatgcgtaaggccgtgacgttttaacgtccctgctcagctttattaccttcaggtaaggcttcgccacgcctgaagacatttctgtactgtttcagacagtgcggagggactccttatgtttaaagaaatttttacccggctcattcgccatttaccttcccgtctggttcatcgtgatccattgcctggcgcgcagcagacagtgaatacggtggtcccgccgtccttaagtgcgcattgcctgaaaatggcggtgatgcccgaagaagaattgtggaaaacgttcgacacccatccggaagggttaaatcaggcggaagtggaatctgcccgcgaacaacatggtgaaaataaattacccgcacaacaaccgagcccgtggtgggtacatttatgggtctgctatcgcaacccctttaatattttactcaccattctcggcgctatttcttacgccacggaagatttatttgctgcgggcgttatcgcgctaatggtcgctatttctacgttgctgaactttattcaggaagcacgttccactaaagcggcagatgccctgaaagcgatggtcagcaatactgcgacggtgctgcgcgtaattaacgacaaaggcgaaaatggctggctggagatcccgatcgaccagctggtgcccggcgatattataaaactggcggcgggagatatgatcccggcagatttacgtatcttgcaggcgcgggatctgttcgtcgctcaggcgagcttaaccggtgagtctctgcccgtagaaaaagccgctaccactcgccagccggagcacagcaatccgctggagtgcgacacgctgtgttttatgggcaccaccgtggtgagcggcacggcacaagcaatggtgattgctacaggtgccaatacctggtttggtcaactggcggggcgtgttagtgagcaggaaagcgagccgaatgcctttcagcaagggatcagccgcgtcagtatgctgctgattcgctttatgctggtgatggcaccggtggtgctgttaatcaatggttacaccaaaggcgactggtgggaagcggcgctgtttgcgcttagcgtcgcggtaggcctaacgccggaaatgttgccgatgattgttaccagcacgctggcgcgcggcgcagtaaagctgagcaaacagaaagtgatcgtcaaacatctggatgctattcagaactttggcgcaatggatattctgtgcactgataaaaccggcaccctgacgcaggataaaattgtgctggagaatcataccgatatctccggtaaaaccagcgaacgcgtgctgcatagcgcgtggttgaacagtcattatcagaccggacttaaaaacctgctcgatacagcggtgctcgaaggtacggatgaagagagtgcgcgcagcctggccagtcgttggcaaaaaattgatgagattccgtttgatttcgagcgtcgccggatgagcgtggtagtggcagaaaataccgagcaccatcagctggtttgcaaaggtgcattgcaggaaatcctcaatgtgtgtagccaggtgcgtcacaatggcgagattgtgccgctcgatgacatcatgctgcgtaagattaagcgggttactgatacgctgaatcgtcaggggctgcgcgtggttgcggtggcgacgaaatacctgccagcgcgtgaaggagattaccagcgggcggatgaatccgacctgatcctcgaaggatatattgcttttcttgatccgccaaaagagacaaccgctccggcactgaaggcattaaaagcgagtggaattaccgtaaaaatccttactggcgacagtgagttagttgcagcgaaagtgtgccatgaagtggggctggacgcgggagaggtggtcattggtagtgatattgaaacgctatctgacgacgaactggcaaatcttgcacagcgtaccacgctgtttgcccgcctgacgccgatgcataaagaacgcattgtgaccttactgaagcgcgaagggcatgtggttggctttatgggcgatggtattaatgatgcgcccgccttacgcgctgcggatatcggcatttctgtggacggcgcggtagatattgcccgtgaagcggctgatatcatcctgctggaaaaaagcctgatggtgctggaagagggggttattgagggacgtcgcactttcgccaacatgctgaaatacatcaaaatgacggcgagctctaacttcggtaatgtgttcagcgtgctggtagcgagtgctttcttgcccttcctgccgatgttgccgttacacttgcttattcagaacctgctgtacgatgtgagtcaggtggcgatcccgtttgataacgtcgacgacgagcaaattcaaaagccgcagcgttggaatccggcggatctggggcgctttatgatcttcttcggaccgatcagcagcatcttcgatattttgacgttttgcctgatgtggtgggtattccatgccaacacgccggaaacgcaaacgctgttccagagcggatggtttgtggtgggcttactgagccaaacgctgattgtgcatatgatccgcacccgccgtgtgccgtttattcagagctgtgcaagctggccgttaatgatcatgaccgtgatcgtgatgattgtcgggatcgcattgccgtttagtccgctggccagttatctgcaattacaggcgctgccgttaagctatttcccgtggctggttgcgattctggcagggtatatgacattaacccagttggtgaaagggttctatagccgtcgttacggctggcaataaagaataaactgggcacgatagccccgattcagattgtagacaaagtgagttttgttcatgccggatgcggcgtaaatgccttatccggccaacaaattcaataaattgcaggaatcacgtaggcctgataagcgtagcgcatcaggcgattttgcgtttgtcatcagacttaatccgggcatgatagcccggatttccatcaagattagcgacgaacagcgatcgcttcgatctcaatcttcacgtctttcggcagacgggcaacttcaacgcaagaacgtgccgggaaggtggcgttgtgttcggtgaagaaggcttcgtaagtggcgtttacggttgcgaagtcgttcagatcttttacaaacacggtagttttaacgatgtcgcccactttcaggccagcggcttcgacgatcgcttttacgttatccaggctctgacgtgcctgtgcagcgacgtctgccggtacttcgcccgttttcggatttaccgggatctgaccggaggtgatgatcatattgcccagatcaacgccctgtacgtaaggaccgatagctgccggtgcattttccgtcgcgatagttttgctcatgatttctcctttattacagcggtaaaaagtctggctcattatagggagccagacttttattaccaaccgcaattaattggccagcaccacattatgggaaaactctttttcacagtatttgcatttgagcgcgatatcattggcgcgttttcgcacggcaaagctggaactaaccggttcggcatggctgatacagttgctgttcgggcagaccagcacattgtcgatgcgctccggcagacttgggcggcttttacccaccacttcatagttgtcgatacggttaaccgtggcttgcggcgcatacaatgccagttgatctacttgatcttcactcaaaaaggtattttcgattttgatcagatctttgcggcccatctcgccagaaggcaggttcagaccaatggtgatgcgctgatccgtttcggtcagcttgaacagactcaacagcttaaaaccgatctgggcggggatatggtcaattaccgtgccgcgtttaatagcttcaacctgcaatttattatcgtgtgtcatctctatttccccttacagtaccagatcgcgattcagaaccagtgccagtaacgcctggcgagcgaaaatcccgttgcctgcctgctggaagtaccaggcgtgtggcgttttatcaacatccgtcgcaatctcatcaacacgcggcagcggatgcagcactttcatattggctttggcgttgtggagatcgctggcgcgaagaacaaactgcgctttcacgttggcgtactcggacgggtccagacgctctttttgcacgcgggtcatgtacaggatgtctacttccgccatcacttcttcaatagagctgtgcagactccatgcgatccctttttcatcgagcatatccagaatgtattgcggcattgccagcgcgtccggcgcgatgaagtaaaaacggttgccgtcgaacttcgctaacgcctgagtcagggagtgaacggtgcggccatatttcaggtcaccaaccattgcgacgtggagattgtccagacgcccctgggtttcctgaatagtgaataagtccagcaaggtttgcgtcggatgttggttggagccatcaccggcattcagtaccggtacattgccggaaaactcggtggccaggcgcgccgcaccttcctgcggatgacgcatcactatcgcatcgacgtaagtgctgataacgctaatggtatcggccagcgtttcgccctttttacccagacttgtattggcgctgtcggagaagcccaccacgctggcccccaggcggtgcatagatgtttcgaaagagaggcgggtacgggtagaggcttcgaagaaacagctggcaatgactttgtgcttcaacagctctggttgcgggtttgctttcagtttcgccgctgtcgccagcaccagattaaggtcatcgcgactaaggtcgtttatggaaatgatatgtttctgatatagcggattagccatcttttatctcctgacgcctgggcaaaaaaaagcccctcgattgaggggctgggaatgggtgatcaacgggaagaaaaacggcaggccagcgtcttttttcagacgcggtaagacaaaatgtcgaacacactgaaccatacatcctcccggcaaattgtccggcattatactcatcgtcagaagcggcgcaagcatttgatgcaatattttgtcagcgcaaacggtttatttgaattaaaagtcaaggtatatgcatttttatttgatgtgattctgcaggggaactgtccttcggtatcaataattgcagacattccctgctttttcctttttcactttcacgcaatcagatatgcattttattccattcatccgacttatagggcggagtgtgaaagcgaacggctaacactattgcttactgctcagggatgcgcgctatcactttaatttcaaaatcaaagcctgccagccatgtaacacccaccgccgtccagtttggataaggtggggcgctaaatatttcatttttcaccgtcatgatgtcttcaaattggttttctggatcggtatggaagctcgtaacatcaatgatatcgtcaaaagtgcatcccgcagctgccagggtcgcatgcaaattatcaaatgccagtctgacttgttgctgaaaatcgggttctggtgttccgtcctctcgacttcctacttgcccggaaacaaacagcaaatcgccggaacgaatagccgcagaataacgatgctcagcatatagactatgtcggccagcagggaaaacagcggttctttctaccatttggttatcctcaagatttacgacatgaacagaagatttctctttaccgggagccgcttttagcggacgacgtgagtaaacaaaacccagacatcatggataatggctgggcttaattgagcgtagtcggttatgcgccaaacgcgccatcaatggtatgcatcgcgccggtaacaaaactggcttctggccctgctaaccatgcgaccataccagcgacctcttccggttgcccatgtcttttgatagccatcaaactatgcaacatatcgcgcattggcccgttggcgggattagcgtcggtatcaattggccctggctggacgacgttaatggtgatcccacgcggtccaaaatcacgggccagcccgcgcgccatgccttgcagggcagatttgctggcggcataagcagccatgcctgcaacaggcatacgatcgccattcacggagccgatgattaagatgcgcccgccttcgggcatctgccgggcggcttcaacagaggcatgataaggagcatgaatattgattttgaaaaggcgatcaatatcgtcggcatttaattccagggcctcgccaaagacgccaatacctgcatttaccaccaggatatccaatgcgccgctcttacgaacgacatcaatgacagcgtctctgtcagcactatctgtgaatactgctgtcgctccagtctcttgtgccaggcgtttagcggcatctttgctccccgcataggtgaatcgtacattggccccatcggtgacgaaacgacgtacgatagcggcaccgataccacgactgccaccgaggatgagaactgtcttacctgtaaaagcgcccataaggactccttgatttattatgtaacatgcattacaaaactgttttaactttctgtcaacaggttttgtaatggtcactaaaaaacaatctcgcgttccaggtcgtcccagacgtttcgctcctgagcaggcaatctctgcggcaaaagtgctttttcaccaaaaaggtttcgatgctgtcagtgttgctgaagttactgattatcttggtattaaccccccgagcctctacgcggcttttggcagtaaagctgggttatttagccgtgtactcaatgaatacgtcggtacggaagctattccgcttgccgatattcttcgtgatgatcgtccggtaggcgagtgcctggttgaggtattaaaagaagcggcgcgcagatatagccaaaacggcggctgcgctggctgtatggttcttgaaggtattcatagtcatgatccacaagcgcgtgatattgccgttcaatattatcacgccgcagaaacgaccatttatgactacatcgccaggcggcatccacaacgcgcacaatgtgtgactgattttatgagtaccgtgatgtctgggctttctgcgaaggcacgagaggggcactctatagaacaactctgtgcaacagctgcaatggcgggggaagcgataaaaactattcttgaggagtgatgcgggccttgacccgaaaggcgggaaagcgcctgccgataagttgtgataagacaataattcacgcgttaaggctagcggaattgattatcttttcgtataacgatagaaatgaaacgttgttttaattaaggagtggaaaagatgatcatcggaaatattcataatcttcagccgtggctaccccaggagttacgccaggcgattgagcatatcaaagcacacgttacggcagaaacgccaaagggcaagcacgatatcgaaggcaatcgactgttttatcttatcagcgaagatatgaccgagccgtacgaagctcgccgtgcggagtaccatgcccgctatcttgacattcagattgtgttaaaaggtcaggaaggcatgaccttcagcacgcaacctgcaggcgcgccggataccgactggttagctgataaagacatcgcatttttgccggaaggcgttgatgagaaaacagttattctaaatgaaggtgattttgttgtgttttatccgggggaagtgcataaaccgctgtgcgcagtgggcgcgccagcccaggttcgcaaagcagtagtgaagatgctgatggcgtgatgacttttcgccgtaaataactcaaggtttacggcgagtttgtgaaaagagcgttttttgatatttttttgtgagtaaaatttgtaatgcttagacgttcttattcactcaaggagttcgtcatgagcaaaataagtgatttaaattattctcaacacattacattagccgacaattttaaacaaaaaagtgaagttttaaatacctggcgtgttggaatgaatgattttgcccgtattgccggggggcaggataacagaaggaatattctttctcctggagcatttttagagtttttggcaaagatatttaccctgggttatgtggattttagcaaacgctccaacgaagcgggtagaaatatgatggctcatattaagtccagttcttattctaaagatactaatggcaatgaaaaaatgaagttttacatgaataatcctgtaggggaacgagcggatagtcccaaggtgattatagaaattagtctttccactatcactactatggggactcgtcaaggacatacagccattatatttccacaacctgatggtagcactaaccgttatgaagggaagtcctttgaaagaaaagatgagagtagtttacacctgattactaacaaggttctggcgtgttaccaaagtgaagctaacaagaaaatagcgcgtctattaaataataatcaggagttaaataatctacagaaattaaataatctacagaagttaaataatctactgaagttaaataatatacaggggttaaataatcctcaggagttaaataatccgcagaatttaaatgattctcaggagttaaataacagccaggaattaaatagtccacaggagttaaatgatccgcaggagttaaataattctcaggacttaaataactctaaggtgagttgtacagttagtgttgattctacgattacgggtttattaaaagaaccattgaataatgcattattagcaataaggaacgaacatctgctattaatgcctcatgtatgtgatgaaagcattagttacttactgggcgaaaaaggtatacttgaagaaatagataagctctacgcattaaatgatcacggaattgataatgacaaagtaggtaacaatgaaattaatgacatcaaagttaacctgtctcatattcttattgattccttagatgatgcaaaggttaaccttacaccggtcatcgatagcattctggagacttttagtaaatccccatatattaatgatgtaagaatactggattggtgttttaataaaagcatgcaatattttgatgatactaaaaagataaagcatgcatgctccgtaataaatcatattaatcttcgcagcgatcagtctaaaatagctgagacattatttttcaatctcgataaagaaccctataaaaatagccctgaattacaggggttgatttggaataagttggttgtatatgtcaatgaatttaacttaagtaatcgagaaaaaacaaatttaatacaaaggctatttgataatgttgagtctatatttaatgaagtacctgtcagcattttagtgaatgatatttttatgaatgatttctttatgaaaaatcctgagatgattaattggtacttccctcagttacttaagagttatgagggtgaaaagatttattttgataatttaaaatatgatttaaatgataatgataaggaatctaataaagaaattttgaagaatcaaccagataatgttatcaaagaaaaactgaataatgaatacaaacttagatttagaatgatgcaaactatcttgcaaagcagagttaatgtattaccatatattaatgaacagcgtttaaataaactaaatccaccggaaaatttacgtatagcaatagaacactttgggtggaagaatagacctatcactgcataaaataatgtgatgccgggatggtttgtatttcccggcatctttatagcgatagcaattatttactgagcgtcgcgaccatcaccgctttgatagtatgcatacggttttccgcctgatcaaaaacaatgctggcggcagattcgaagacctcatcagtgacttccataccgccatgtaggccaaattcttccgccattttcttgccaagcgtcgtttggtcgtcatgaaacgcgggcaggcagtggaggaatttgacctccgggttaccggtcaactgcatcatcttgctgttcacctgatattcacgcagcaatgcaatccgttccgcccatttctcttttgcttcccccatgctcacccacacatcggtatagataaagtcagcaccttcaactcccttcgcgacatcttcagtcagcgtaatattcccaccattttgctgtgccagggcgcggcattccgtaaccagcgcagcttccggccagcacgcttgtggcgcgaccagacgcaaatccagaccggtaagcgccgcagcttcgagcatgctattgcccatgttgttacgcgcgtcacctgcatagaccagcgtcatttcgttgaacgctttgccgggcaaatgctcctgcatggtgagaagatccgccagcagctgcgtgggatggaactcattggtcaggccattccataccggcacgctagcgtattccgccagtgtttcgacaatctcctgaccatagccgcgatactgaataccgtcatacatgcgaccaagcacgcgggcagtgtctttaatgctctctttatgaccaatctggctgccgcttgggccgagataagtaacgcgagcaccctggtcatatgcggcaacttcgaaagagcatcgggtacgagtgctgtctttttcgaagatgagcgcgatgtttttaccagtgagtttggcttcttctttaccgcttttcttatcggctttcagcttcgcggctaactgcagcaggctgttgagttcagctggcgtgaaatcgagtaatttcaggaaatgcttatgataaaacccggacatagatccctcctgtggctaacgcctcaatgaattaaaattcaatttatatggatgattattcatttgcaagtctaaagcataaatctttgtcacaaaggtggaggcaatgtcagtggtgtgtgacaataagagtatcggcaggacattaagaggaatgagccatggcaaacccggaacaactggaagaacagcgtgaagaaacacgtttgattattgaagaattactggaagatggcagcgatccggacgcgctgtacaccatcgaacaccatctttccgcagacgatctggaaaccctggaaaaagcagcagttgaagcgtttaaactcggttacgaagtgaccgatccagaagagctggaagttgaagatggtgatatcgtgatttgctgcgacatcctcagcgagtgcgcgttgaatgccgatctgatcgatgcccaggttgaacaactgatgacgctggcagagaaatttgacgttgagtacgacggatggggcacttactttgaagatcctaacggcgaagatggcgacgatgaagattttgtcgatgaagacgatgacggagttcgccactaattaagcgtagcgcatcaggcccaggtagttcctgcaacctggtgaatttgtagcccggataaggcattcatgtcacatccggcataaacaaaacgtacgttgttaatgttcgaatgcccgcgagttgaacacgcgggcatttttttagagttcgcgcaacatccgcacttcacaatcgacatggcccgtgcagccaagcgcatagtcgatatgctcaaagcccaaatgctcataaagcgcaatggcttcctttaaaaaagcggtcgtttccagatagcagcgtttgaaacccatctctcgcgcctgctccatcgccattaaggccagtttttttgccagccctttgccgcggatagccggaagaaaatacatcttttgcagttcgcaaatatcgctctcactcccggttaatggcgctatcccaccgccgccgaccacttcaccctcgtactcaacgacccaatatgcatggccaggctgactatatacttgatacagctcgtcaagattcggatcggcgacggtgtagcctttatcagcggtaagaccgtattcggcggatacctgacgaatgacgcgggcgatagcaggattatcctgcagcgtcaggcgacgcattacaggactttgcggcgcaatgttattcatagtttaacccaataaaaataaagtaattatacatttgtttaataccactctcttcttacgtacgcaagcgacttataaagtaataaagtttttgccagcctattactgataagagtattgtaacgtggcagaacattttactgtctgtatatataagttatatcaatggattttttaattcagggaatttttatggctcaagttattaatgaaatggatgttccgtcccatagctttgtttttcatggtacaggtgagaggtattttcttatttgtgtggtgaatgtgttgttaacgattataacgctaggtatctatttaccatgggcattaatgaaatgtaagcgttatctttatgctaatatggaagttaacggacaacgattttcttatggaattaccggtgggaatgtttttgttagttgtcttttttttgtttttttctatttcgcaatcttaatgacagtgagtgcagatatgccgcttgttggttgtgttttgactttgttactgttggttttgcttatatttatggcagcaaaaggactgcgtcatcaggccttaatgaccagtctcaacggcgtaagatttagttttaattgctctatgaaagggttctggtgggtgacctttttcttgccgattttaatggccattgggatggggactgttttctttatcagcacaaagatgctacctgccaatagtagtagtagtgttattatatccatggttctgatggcaatagttggtattgtttccattggtatttttaatggtactttatatagtctggtaatgagttttctctggagtaataccagtttcggtatacatcgtttcaaggtgaaattagatactacgtattgtataaaatatgccattctcgcatttttagctttattgccttttctcgctgttgctggttatattatcttcgatcaaatattaaatgcgtatgatagttctgtatatgcaaatgatgacattgagaatttacagcaatttatggaaatgcaacgtaaaatgataatcgcgcagttaatctattattttgggattgctgttagcacaagttatttaacggtgtctttgcgaaaccattttatgagcaacctgagtctgaatgatgggcgtattcgttttcgcttaactttaacgtaccacggtatgctttatcgcatgtgtgcgttggtggtgatatccgggattacgggcggtctggcttatccactgctgaaaatatggatgattgactggcaggcaaaaaatacgtatttgctgggcgatttggatgaccttcctttaatcaataaagaagaacaaccagataaaggcttcttagccagtattagtcggggagttatgccttctttaccatttctgtaagagataaaaaaggccggagcatgctccggccttcgttttcatcactgtgttttgattacagcgcggcgataacagcctgctgttcaatcagtttcgctttcgcttccgcatagccttccagcttctcacgctctttcgcgatgaccgcttccggtgcgcgggcgacaaagccttcgttcgccagtttgttctcgatacggctgatttcaccttcaatcttcgccacttctttcgccagacgcgccagctcatcttctttgttgatgaggccagccatcgggatcagcagctctgcaccgtcgatgatcttcgtaacggaaaccggacctttgtcatcggcaggcagcacggtgatactttccagacgcgccagggtttgcaggaagccacggttttcatttacgcgacgttctgcatccgcgctgcaaccacgcagcagcagctccagcggtttgcccggcgcgatgttcatttctgcacggatgttacgtaccgcaacgatcgcctgtttcagccattcggtgtcggccagtgcggcttcatcaacctgagatgcatcgtactgcgggaacggctgcagcatgatggtgtcggcagtgataccgcaaagtactttcacacgctgccagatggtttcggtgatgaacggaatgatcggatgcgcgaggcgcagcagaccttccagtacagtcaccagcgtatggcgagtaccgcgcagttctgcttcggtgccaccgttcattaccggcttggtcagctcgagataccagtcacagaactggttccaggtgaactcatacagaatgcctgcggcgatatcgaagcggaagctgtccagcgcttcgcggtacgctttgatggtctggttgaactccgccagaatccagcggtccgccaggctcagcgtcatttcgccgccgttgaagccgcaatcctgaccttctgtgttcatcagcacaaagcggctggcgttccacagcttgttacagaagttacggtaaccttccagacgcttcatatcccagttgatgtcacgaccggtagacgccagcgccgccagggtgaagcgcagcgcgtcagtaccgtgcggctcaataccgttcgggaactgcttctcggtgcgcttacggattttgtccgccagctgcggctgcatcatattgccggtacgtttttccagcagttctggcaggctaataccgtcaaccatatccagtgggtcgataacgttacccttggatttggacatcttctggccttcgtcatcacgaatcaggccggtcatgtaaacggtgtggaacggcacctgcggtttgccattttcatctttgatgaagtgcatggtcatcatgatcatgcgggcaatccagaagaaaatgatgtcgaaaccagataccatcacgctggttgggtggaactgacgcagggcgtcggtattttccggccagccaagggtagagaaggtccacagcgcagaagagaaccaggtatcgagaacgtcttcgtcctgacgcaggacaacatcagcaccgaggttattttctttacgcacttcgtcttcgttgcggccaacataaacgttacccgcttcgtcataccatgccgggatacggtgaccccaccacaactgacgagagatacaccagtcctgaatatcgcgcatccaggagaagtacatgttttcgtactgcttcggtacgaactgaatgtcgccgttctcaaccgcttcaaccgccggtttcgccaggacatcggcacgcacgtaccactggtcggtcagcattggttcgataactacgccgccacggtcgccgtaaggaacggtcaggtcgtgcggtttaatttcttccagcaggccaagcgcgtcaactgcggcaacgactgctttacgtgcagcaaaacgctccagtttctggaactctgcagggatttcgctggaataaacgtcagattcgttacctttggtatcgaacacctgggcgctttcacggatatcgccgtcaaaggtcaggatgttgatcatcggcagggcgtgacgtttacccacttcatagtcgttaaagtcgtgcgccggagtgattttcacgcagccggtgcctttttccatgtcggcgtgttcgtcgccaacgatcggaatacgacggttaaccagcggcagaatgacatatttgccaatcagatctttgtaacgcggatcttccgggttaacggctacgccagtatcgcccagcagggtttctggacgggtagtcgcgaccaccagataatctttaccgtctgcggttttcgcaccgtcagccagcggatagcggatgtgccacatgctacctttgctttcgcggttttcgacttccaggtcagagatagcggtgcgcagtttcggatcccagtttaccaggcgtttgccacggtaaatcaggtcttctttatacagacgaacgaaaacttctttcaccgcattggacaggccttcgtccatggtgaagcgttcacgctcccagtcgacggagttgccgagacggcgcatctgacgggtaatggtgccgccagattccgctttccattcccagattttgtcgatgaaagcttcgcggccgtagtcgtgacgggttttaccttcttctgcggcaatcttgcgctcaacgaccatctgggtagcgatcccggcgtggtcagtaccgacctgccacagggtgtttttgccctgcatgcgctgatagcggatcatggtatccatgatggtttgctggaaggcgtgacccatatgcaaactgccggtgacgttcggcggcgggatcatgatgcagaaactttcctggctttcatcgccattaggcttaaagtagccctgcttttcccagtgctcgtaaagcggctgttcgatatcttgtgggttatatgtcttttccattatttccaggttgccgtattcaggttgaaaccagccacgcggtaggctttatagcgttcgcgcgccagttgtttcagagaatcttcataaggaacgaagtctaccacttctgtgaaagcggtggcaaaatctgcaaagcttgttcgcagactaatcaatatatcgcgccggctgctgctacgcttttgcggccaggcgatctccaccggtgcaccgccgcgcggtccttctcccgctaaattatgcggaacaaagctttctgccggacgcgcccacagggcttcatccagccggtaagcctgcttttcatcttcacaggcgatgagcacgcgcttaccgctgcgccaacgttctgcggcaatttcacacaccagttgctcaacggcgcttaagccatcgacggtggtgtcattgtccagaaggtagaacgtcgcgtttttcataaatggggcttcttgtggtggatttaaatacgcatcaggtatacaccgcagcgcctgatgcgacgctgttgtgtcttatcaggcctacgagttcagtgctgtgtaggtcggataaggcgttcacgccgcatccggcaataacagccttgcctgacgcaattactcttcgccgttaaacccagcgcggtttaacaggaactgtgccagcaacgctaccggacgaccggtggcgccttttgctttaccagaacgccaggcggtaccggcgatatccaggtgcgcccagttgtacttacgggtaaagcgactcaggaagcaacctgcggtaatcgccccaccaggacgaccgccaatgttcgccatatcggcaaaattggactccagttgttcctgatactcgtcacccagcggtaagcgccatgcgcggtcaccggattgttcagacgcggcaatcagttcatgggccagcggattatggttcgccatcagaccagtaatatgatgacccagcgcgatcacgcaggcaccggtcagcgtcgccacgtcaatcaccgcttccggctcaaaacgctcaacgtaagttaacacgtcgcacagtaccaggcggccttcagcgtcggtgttcagcacttcaacggtttgaccggacatggtggttaacacatcgcccggacgataggctcgtccgccaggcatgttttcgcagcctgccaacacgccgataacgttaatcggcagttgtagctccgcgaccatccgcatcacgccgtaaaccgctgccgcaccgcacatatcgtacttcatctcatccatgccttcactaggcttgatgctgataccgccggagtcgaaggttaaacctttacccaccagcacgattgggcgtgcatcttcgctcgcgttgcctttgtactcaatcacgctcatcaggctttcgttttggctaccctgaccgaccgccagataggaatgcatccccagctctttcatctgctgttcgccgataacgcgggtgatgacattcttgctgtagctgtcagccagctggcgcgcttgactagcgaggtaagcggcgttacagatattcggcggcatattgccgagatcttttgctgctttaatcccggcggcaatcgccagaccgtgctggatcgcgcgctcaccgctggtcagttcacggcgggtcggcacgttgaacaccatcttacgcagcggacgacgcggttcgctcttgttcgttttcagctgatcgaaactgtagagcgtctcttttgccgtctcgacagcctgacgcactttccagtagttgttacggcctttaacgtgcagctcagtcagaaagcagaccgcttccatactgccagtatcattcagcgtattaatggttttctgaataacctgcttgtactgacgctcatccagctcacgttctttgccgcaaccaataaggagaattcgctcggaaagtacattcggaacatggtgcagcaacaatgtctgccccggttttccttccagttcgccccgacgtagcagggcgctgatgtacccatcgctgattttatcgagctgttctgcaatcggagaaaggcgacgtggttcgaagacgcccacgacgatgcaggaactccgctgtttctccgggctaccgctttttacactaaactccatgcactacgctcctgaatcttaaagacaacggcggtggctacagatagaattgcaagctttcgtaactcatgtccgctgttgcgatgacttcgtgttaatcttaacgttattacggcattggcacgtcagaacaaaatctgagaggtgaatccgttgagtataattatcttagcgacgatttcgacgactcaagagaataaatgacgtttaagccatgaaacaagctaaaatcctgcaaaagacgagtttttacgggcgtatttaaagtgataatcataagatatctggtgcgggagacgctcaaaagccagctggcgatactcttcatcttgcttttgatcttcttctgtcaaaagttagtgaggatcctcggcgcagcggttgacggcgatattccggcgaatctggtgctctcccttctcgggttgggcgtgccggaaatggcgcagcttatcctgccattaagcctgttcctcgggctgctgatgacgctgggcaaactgtataccgaaagtgaaattacggtaatgcatgcctgcggcctgagcaaagcggttctggtgaaagcggcaatgatccttgcggtattcacggcaatcgtagcggcggttaacgtgatgtgggcgggaccgtggagtagccgtcatcaggatgaagtgttagcagaagcgaaagcgaaccctggcatggcggcgctggcgcaagggcaattccagcaagcgactaatggcagcagcgtgctgttcatcgaaagcgttgacggcagcgatttcaaagatgtgttcctcgcgcaaattcgaccaaaaggtaatgcacgtccttctgtggtggtggccgattccggacatttaacccagctgcgcgacggctcccaggtcgtcactctcaaccagggaacgcgcttcgaaggcactgcattgttacgtgatttccgcattacggacttccaggattatcaggcgatcattggtcaccaggcggtggcgctcgacccgaacgataccgaccagatggacatgcgcacattgtggaacactgacaccgatcgtgctcgcgcagaactgaactggcgtatcacgttggtattcaccgtgtttatgatggcacttatggtcgtaccgctgagcgtggttaacccacgtcagggacgcgtactgagcatgctgccagccatgctgctgtatctacttttcttcctgatccagacctccctgaaaagcaacggcggtaaaggtaagctggacccgacgctgtggatgtggaccgttaacctgatttatctggctttagcgattgttctcaacctttgggacaccgtgccggtccgccgcctgcgcgccagttttagccgtaaaggagcggtgtgatgcaaccttttggcgtacttgaccgctatatcggtaaaactattttcaccaccatcatgatgacactgttcatgctggtgagcctgagcggcattatcaagtttgtcgatcagctgaaaaaagccgggcaggggagttacgacgcgttaggcgcaggaatgtataccttgctgagcgtgccgaaagatgtgcagatcttcttcccgatggcggctctgcttggggcgttgcttggtcttgggatgctggcgcagcgcagcgaactggtggtgatgcaggcttctggttttacccgtatgcaggtggcgctgagcgtgatgaaaaccgccattccgctggtcttgctgacgatggcgattggcgaatgggtcgcgccgcagggcgagcagatggcgcgtaactaccgtgcgcaggcgatgtacggcggcagcttgctctctacccagcaaggcttatgggcgaaagatggcaacaacttcgtctacattgagcgggttaaaggtgacgaagagttaggtggcatcagcatttatgcctttaacgagaatcgtcgtctgcaatccgtacgctatgccgctactgcgaagtttgacccggaacataaagtctggcgtctgagccaggttgatgaatctgatctgaccaatccgaaacagattaccggtagccagacggtgagcggcacctggaaaaccaacctcacgccggacaaactgggcgtggtggcgctggacccggatgcactctctatcagcggtttgcacaactatgtgaagtatctgaagagcagcggtcaggatgccggacgttatcagctcaacatgtggagcaaaatcttccagccgctatctgtggcggtgatgatgctgatggcgctgagcttcatctttggcccactgcgtagcgtaccgatgggcgtgcgtgtggtcaccggtatcagtttcggttttgtcttctacgtactggaccagatcttcggcccgctgacgttggtttatggcatcccgccgatcatcggcgcactgttgccaagcgccagcttcttcttaatcagcctgtggctgttaatgagaaaaagctaaccgaatgaacgaataaagggagcgaaagctccctttattattgttagcaaagtgtgcttcgttcattcctgaaaaataattaaaattcaatatattgcagtggggtgggcatgataagacgcgccagcgtcgcatcaggcaaagacaaatctcgcctgacttaccttcttctcccccccagcaaactccccaacatcccgcgtacaatctgattcgtcacttggcgagcggcgcttttggccattgtttgcaccacaccatctttcttcccgccgcgtggtccggtagtgccgaacaaaatatccttcaatccaccaagaatgccgtcatccaccgctacctctttccctttcgcgggaggattattttgctgctcggtactggcctgaaagcctttttgcaacatctcataggcggattcccggtccacctcatcctcatatttgccatacaccggagagtgattaatcaagccattacgctcatcttccgtcaccggccccatccggctacaaggcgcgatcaccatcgcacgctccaccacagaagggcttcctttcgcatccagaaaagagatcaacgcctcgccggtgcccagttcctgaatcgccttttcggtatcaaacgccggattggcccgcatggtttgcgccgctgccttcactgctttctgatcttttggcgtaaaagcccgcaaagcatgttgaacgcgattaccgagctgcccgagcacattatccggaatatcagacgggttttggctaacgaaccagacgcccacgcctttactgcgaataagccttatcacctgctcaatcttatccagcagtacctgcggggcatcgttaaacagcagatgtgcctcgtcgaagaaaaacaccagttttggtttctccagatcgcccgcttccggcaattgttcatacaactcactaagcatccacagcaggctggcggcgtacagtttcggcatctgataaagtttctcggcgctgaggatattgataacgcctttaccgttggcatcggtgcgcatccagtctttgatatccagcatcggctcaccaaagaagtgtgctgcgccttgctgttccaggctcaacagcccgcgctggatggcaccaacgcttgcgctactgatattaccgtactgattctggaaggatttggcgttatcgccgatgtactgggtaattgcccgcagatctttaaagtcgagcagtaacagcccctgatcgtcagcaatgcggaagatgatattcagcacgccagattgcacatcgttgagattcaacagtcgtgccagcaacagcggccccagatcgctaaccgtcgcccgcaccggatggcctttctcgccaaagatatcccacaccaccaccggattggcatgcggttgccagtcattgacgccgatatttttaagccttgcgagcagtttttcgctcaccgttcctgcctgcgcgacgccggtcagatcgcctttcacatcagccataaacaccggcacgccgatttcgctcaaactctccgccagtttttgcagcgtaacggttttacccgtccccgttgcgccggtaatcagcccatgacggttagccattcccggcagtaaaaacagttctgtgtccggcgtgcgggcaattaacaggggttcactcatgagatatcctccagtttcctgcctggagtataggcaacgtccggcaaagagaatacgtgtaatgaagagaaaataacttaaagcgtgttgccgtgataaatctgatacccgaggtcaacagtgttgtggttgtgatcgttatttttaattttgctcagcaacatttgggcggccatccgaccaatatcaaaacggggagtaattacgctggcgaggcttgggatcatttgcctgccaatctccagcccatgaaaacccgcaatggaaatttgttctggcacggcgaggtttcgctcgcggcacagcagaagcgcacccatcgcaatatcgtcattggtgcaaaatacaccgtctaaatccgggtttgcgctaagggcatcacgcattaactgcattcctaaatgaatggaactgatggcgcgtggattcatgcgtaatggggaaagattatgcagcatcatcgcatcgcaatacccctgataacgctgttcatcgcgggtgtcatctttggaaccgagatacagaattttgtgcctgactcgcttctccagcatggtacacaccatgtcaaaagcggcctgccgattatcaaaaccgacctccatatccagccgttctccctgtacatccatcaattccacgaccggaatggtggcactacgcagaaatttcaccgtcctgatggtgtgatatttttcgctaagtataatcccgtcaatgttataagagagcaggttaatcacgctctcttcttcggaatcgcgatcgtaattgtaattagcaataagggtctgataattatgctcagaggtgacggattctattcccgcgagaatgtcagcgaagagttgattttgaaaactcggaatcaagataccgagggtataactttgtgcattcaacaacatgccgggagcgcgattagggatataattgatctcttccataattttggcgatgcgctcgcctgtttcctttgccacctttttcgggctgcggatataacgactcacggtcatttttgttacgccagccagcgtagcgatatcctgtaaagaaattctgtgattgcgcataacttctcccaacgtcgggggaatcttcaatcttcccccgaaactacatcacaatattttattctttcagtgcaatacggcgttaatggctaacacgcccagcaaacccataatagaaataagggtttccatcaccgtccaggtacgcaacgtttcaccaaccgtcagattaaaataccctttaaatagccagaagccagggtcgtttacgtgactcgcgatcacgctgcccgcaccggttgccagtaccattaaagcgggatcggcatgggtaacgttgataatcggcaacaccacacccgcggtggtaatggccgcgacggtggcagagcccagagcgatacgcaacagcgccgcaacagtccagcacatcaataacgggctaagtgtagttccggtcattaagtgactaatatagtgcccgacaccgctatctactaatacctgcttaaacgcgccgccgccagcgataataaacacaatcatcgcgatagcgcctatagaatccccaatgatatccatgatttgctcgatggtgcgtccattacgtcggcccagtgtgaaaatcgcaataacaatggcaataaacagcgcaacggcagggttaccgacaaattcaaagaagaggcgcacggtgttagttttcggtaacgtaatttcacaaacggcggcgatagccatcaggatgaccgggatcacggcagcgaaaatactgttccagaaggagggcatctcctcttcgctaaacagatgaggattaaataagccttccggtggtgctttctcaaagcgagttagcagtttagaaaacagcggtcctgcgacaataactgtcggaatggtaatgataaatccatacagtaaagtcgttccgagattagcctcaaagatagtcgcgatggcagtaggccctggatgtggcggcagaaaacagtgggttacagagagcgctgctaccattggtacgccaacatacaacaggggtaatccactacttgctacgatggtaaataccaacggcaacagcaggacaaaacccacttcaaaaaacatggcgaggcccacaaccagaccggtgatcactagcgcccattgcacgcgttttttaccaaaagtagcaatcagcgtagtggcgatacgttgtgccgcacccgtatcagaaatcagcttgcctaacatggccccgaaaccgaggatcattgccagcccgccgagcgtgctgccgataccattttgtatagagtgcaggacggcctgtgcatccatcccttcggcaaatccgacgacggcagctaccagaacgagggcaataaagccgttaactttaaagccgatcatcaggataagaagcagcgcgacgcctgccgcaataatgattaatggcatagtctttatctcttattagtgccagaaaagcagcgctttcgcgctgcacgtaggggggctgttaaacagccactaacatgccgccatcaacaaacaacaggtggccgtttacgaaatcagaggctttactagaaaggaacaccgcagcaccaatcagttcctgcggatctccccagcgtgcggcgggggtccgtttgcacaaccaggcggtgaaggcttcgtcctcaaccagtgctttagtcatttctgttttgaaatagcccggcgcaataccgttgacctgaatattgtggcgcgccagctcgacgcacatgccgcgggtgagcatttttaccgcccctttgcttgcggcataaggggtgatggtgtcacgtcccagttcgctttgcatgctgcaaatattaataactttacctgccttgcgttcaaccatgtgacgagttaccgcttggcttaccaggaacacggcggtctggtttactgcgatcacatcattccactcttgttcagggaactcagtaaaaggatgacggcgctggataccggcgttattcaccagcacatcaatggggccgatgtccttttcgatatgttcaacggcggcatcaatttcatgtttatgagtaacattaaaaggtgcggcaacggcctgaataccctcctggtggagtttttctacagcaagttctgcgcgttcggcagtaatatcattaataattatttgtgcgccatatttacccaggccggttgccagtaaaaagccaatgccctgtgcactaccggtaatcaagatattttttcctgccagactaaatagatcgttcattgtattattcctttatttatctcttagaaaacaagctggacttttgctgcctgggttttatcaccggcgaaacgtagcgcctcttccaggtcagtgaagggatattcagcactcagtaaaggcagtggattgataacgccattcgccagccaactcactgcggtattaaattcgctggtaaaacggaaagagcctctgagactaatctccttaccaatcaacgtcatcattgggaattctgccatcgcgcctcccatacctacctgcaccattacgccgcgtgcacgagtgacctccagacaggtattcacactactaggatgaccggacacttcaaagctgacatcgaaatagcctttttccgctttccagtgatccatgtcgtcgttttgtgggtttacgagcacatccgcccccatctctttgcccaggctaagggaacggggactcacatcagcacagacaatttccgcggcccccagtgttttcactgcactgacaatcaggcagccaatgggtccaacaccggaaataaatactcgcttgccctgtaactcgccggcctgatgtgcggcatgaatcgcgacggctaaaggttcggcaaaagccataaccttttcgtcagctttggccggataagggacacattggctcgtttcgaccattttataacgggtaaaaccaccatcaacatgagggaaatacatggcactgccaaaaaaacgcatatctgtacactgattctcgttatgttcaatgcagtatttgcagtgaccgcacggtttagacggattaatggctaccgtttgcccttcatgtaattcactactgtcgctatgaataactttaccgataacttcatgacctaacaccatcggtgcctttatcatgaaattacctacttttccttcctgataataatgtaaatcggaaccgcaaattccacctcgggttatttgtactaatgttccattattattccaatctatcgtctgctcggtaacggcaacagttttcttgcccgcaacaacgcaggactgtgttttcacttgcataaattcctcactggtcaggtagacacctcggaagcatttaagcggttttaactgtcattatttgtgatgaagatcacgtcagaaaattgttacattactatgttacgcataacgtgatgtgccttgtaattcttatcagtagaaataaaaaaacgtgaaattattatgccgccaggcgtagtatcgcagcaggtaagatgattcaggagattttaaatggcgggtgaaagctttattttgatgggcgttagtgggagtggtaaaacattaattggtagcaaggttgccgcgttattatctgctaaatttattgatggtgacgatcttcatccagccaaaaatatagataaaatgagccagggtattccattatctgatgaagatcgacttccctggctggaacgcttaaatgatgctagttacagtctttataaaaagaatgaaacaggatttattgtctgtagtagtttaaaaaaacagtatcgtgatattttacgcaagggtagcccccatgttcatttcctctggttagatggcgactatgaaactattctcgcgcgaatgcagcgtcgggctgggcattttatgccggtagcgttactaaaaagtcagtttgaggcactggagcgtccacaagcagatgaacaggatattgtgcgcattgatatcaaccatgatattgccaatgtcaccgaacaatgtcggcaggctgtgctggcgatacgacaaaacagaatatgtgcgaaagagggcagcgccagtgatcagcgctgcgaatgattttcaaaaatcggctttcaacaccacgcggtaacgcgccttaccgtcgcgcacatgctggatggcgtcgttaattttgctcatcgggaacagttcggtggtcggcgcaaccttgctgcgggcggcaaaacgcatcagcttacgcagctcataaggcgtgccggtagcagaaccagagacgctgcgatcgcccgcaattaacgtaaaggccggaacagacagcggcgtgagaaccgcaccgaccgtatggaaattaccgccataggtcagcgcctcaaaatagggctgccagtcgaggctgacgttgacggtgttgataatgagatcaaactgccccgccagtgctttcagtgcctgcggatcgcggctattcaccactttatcggcacccatcgccagcacttcctgctctttcgccggattagaactaaaggctgtcacctcgcatcccattgcgtgcagaagttttatagcgatatgccccagcccgccaataccaattaccccaacgcggctggtagcagtgatatggtgcatcaacagtggtttaaagaccgtgataccgccgcacaacagcggcccggcggactcgatatcaatattttctggcagtggaatcacccattgccagtccgcacgcaacttctcggcaaagccaccgcgattcataatcgtcggcaccgcaccttgctcgcagttgatctgattaccgctaatacaggcgtcgcagtgaccacagctacgcgccgtccagccaatcccgacacgctgaccgacctgcaaacctttatcctgcgcggcgctcccgagtgccaccacgcgcccaatcacctcatgcccggcaaccagcggatattgactaaatccccattcgttatcgatcatgctcagatcggaatggcagatcccgcagtaatccacctgcacttcaacatcttgtggcctcagctcaccgggatcgtactcataaacttccagttcgccgcccgcttcttttgcggcatagctttttatcatgctcattttttggtccttctctggtgttgtttgggaagtgtagagcatggcagggcggggtgcctggagtgtgacaaaggttacacatcgctgtatgcaatgctgaaaatttcagcacttagcgaggtgcgagcaagctggcgcttgcatggtggcgtgcgacaggtataatccacaacgttttccgcatacctcttcagtgccgaagtggcgaaatcggtagacgcagttgattcaaaatcaaccgtagaaatacgtgccggttcgagtccggccttcggcaccaaaagtatgtaaatagacctcaactgaggtctttttttatgcctgaaatccagtgtttatctatctttcccgctatattaactctctcaaggtcaaccgatatcaacgtacatctaccaacatatgttggtacagatgatggtatttccggttcgataatgcttgtaccaacagggagggaatacgagaaatcacaggacattgctaatgctggtacgcaatattacctgaagctaaaaacctgcacgttagccctttgtaggccagataagacgcgtcagcgtcgcatctggcataaacaaagcgcactttgctggtctgttcccctcaccctaaccctctccccggaggggcgaggggactgtccgggcacatttttagactttgtcatcagtctgagcctgccattggcaggctctggtgtccttttacgctaccatgctaataatcagcacaataatcagcccaaccacggagttgaccagctccagcagaccccaggttttcaacgtgtcttttacactcaggtcaaagtaacctttgaacaaccagaaagatgcatcgttaatgtgggtgagggtgttggaacccgcagccgtcgccagtaccagcagcgccggattcacgccaaccagctgaccagttgctggatctaggattgcagcactgataatcccggcggcggtcatcgcgctaacgacaccctgacccgtcgccagacgaattagcacagtgatcagccatgccatgatgtaggggctgatattgccgtgggacatcaacatgccgatggtgtcgccaatgccggtgtcgatgatggtctgcttcagcacgccacccgcaccgatgatcagaatcaccattgcaatactcttcaccgcgctttcaaaagcgttcatcacccactgcatgtcatgaccacgtgcggtgccaaagagtacgaatgcaaccaccatcgcaataaacattgcaatcgggctggaaccgataaagttaaccacttcccaggcaggggtatcttttaccagccagatattggcgatggtggtagagatcataatgatcgccgggatcagcggcaccagaatgctaacgccgaaagagggcagattattcatatctaccggttgatctgctttcaggaaacttggcgttgggcgctcaagattgccgaggaacttcggcaggatcagacctgcgcagattacacttgggatcgtcaccagtacgccatagatataaaccatccccatatccgcgccataagcattcaccagcgccaccggacccggctgcggtgggaacagactatgtgcggtagtggcagctgctactgccgggatcgccagtttcaggaacggaattttagcttcggcggcaataacaataaccagcggcgctaacatgataaaggccacttcatagaacatcgccagaccaaaaatcaggccgatgataatcacgctcagctgtacatagcgcagaccgagacgcgccagcagcgtatgcgctatctggtgagccgcgccggagtcgaccatcaatttaccgatgaccgcaccgaacaccacgatgatagccagttcccccagcgtgttgccgaagcccgctttcatagtgtgcagcaggctcatcaaatccatgcccgccagcatcccgacggacagcgccgccaccaacaaagccaccatactattgattttgaacttcaaattcagtaccagcatcagaccaatgccgaataccacccagagaatgttaagcacatgcataacgttttaccttacctggttgaaccgttgttattttgggcgatatgttatgtaaattggtcaaccattgttgcgatgaatgtcacatcctctgatcaataaccatcgattaccctttgctgcaatttgcagcaacaaccatgagagtgaaattcttgtgatgtggttaaccaatttcagaattcgggttgacatgtcttaccaaaaggtagaacttatacgccatctcatccgatgcaacgccacggctgcggtctggttgttcatccggatacctaaacaactccagggttccgcgtctctttgctgtggaacccactatgtgaaagaggaaaaatcatggaacagacctggcgctggtacggcccaaacgatccggtttctttagctgatgtccgtcaggcgggcgcaactggcgtggttaccgcgctgcaccatatcccgaacggcgaagtatggtccgttgaagagatcctcaaacgcaaggcgatcattgaagacgcaggcctggtgtggtctgtcgtagaaagcgtgccaattcacgaagatatcaaaacccacactggcaactatgagcagtggatcgctaactatcagcagactctgcgcaacctggcgcagtgtggcattcgcaccgtgtgctacaacttcatgccggtgctcgactggacccgtactgacctcgaatacgtgctgccagacggctccaaagctctgcgcttcgaccagatcgaattcgctgcattcgaaatgcatatcctgaaacgcccaggcgcggaagcggattacaccgaagaagaaattgctcaggcagctgaacgcttcgccactatgagcgatgaagacaaagcgcgtctgacccgtaacatcattgctggtcttccgggcgcggaagaaggctacaccctcgaccagttccgtaaacacctggagctgtacaaagatatcgacaaagcgaagctgcgcgaaaactttgccgtcttcctgaaagcgattattccagttgctgaagaagtcggcgtgcgtatggctgttcacccggacgatccgccgcgcccgatcctcggcctgccgcgcattgtttccaccattgaagatatgcagtggatggttgataccgtaaacagcatggcaaacggttttaccatgtgcaccggttcctacggcgtgcgtgctgacaacgatctggttgatatgatcaagcagttcggtccgcgtatttacttcacccatctgcgctccaccatgcgtgaagataacccgaaaaccttccacgaagcggcgcacctgaacggtgacgttgatatgtacgaagtggtgaaagcgattgttgaagaagaacaccgtcgtaaagcggaaggcaaagaagacctgatcccgatgcgtccggaccacggtcatcagatgctggacgacctgaagaagaaaaccaacccaggttactccgcaattggtcgtctgaaaggcctggccgaagttcgcggtgtcgaactggcgatccagcgcgctttctttagccgttaatatccaccggcatggctgcgcgccgtgccggttccttcttccttgccgtcactctttgaagacggattctggagtttacgatgactactattgttgacagcaatctgccggttgcccgcccgagttgggatcattctcgtctggaaagtcgcattgtgcatctcggttgcggggcgtttcaccgcgcgcaccaggcgctgtatacccatcatctgctggaaagcaccgacagcgactggggcatctgcgaagttaacctgatgccaggcaacgaccgcgtgctgatcgaaaacctgaaaaaacagcaactgctgtacaccgtagcggaaaaaggcgcagagagcaccgagctgaaaattatcggtagcatgaaagaagcgctgcatccggaaatcgatggctgcgaaggtattctcaacgcgatggcgcgtccgcaaacggcgattgtctctctaacggtcacggaaaaaggctactgcgctgatgcggcaagcggtcaactggatctcaataacccgctgatcaagcacgatctggaaaacccgactgcgccgaagtccgcgattggttacatcgtcgaagcgttgcgtctgcgtcgtgaaaaagggttgaaagcgtttacggtgatgtcctgcgataacgtgcgtgaaaacggtcatgtggcgaaggtcgcggtactggggctggctcaggcgcgtgacccgcagctggcggcatggattgaagaaaatgtcaccttcccgtgcaccatggttgaccgcatcgttccggcggcgacgccagaaaccttacaggaaattgctgaccagctgggtgtttacgacccgtgcgccattgcctgcgaaccgttccgtcagtgggtgattgaagataacttcgttaatggtcgcccggattgggataaagtgggcgcacagttcgttgcagacgttgtgccgttcgaaatgatgaagctgcgtatgctgaacggcagccactcttttctggcgtacctcggttacctcggcggctatgaaaccattgccgacaccgtgactaacccggcttatcgcaaagcggcctttgccctgatgatgcaggaacaagcgccaacgctgagcatgccggaaggtacagacctgaacgcctatgcgacgctgctgatcgagcgtttcagcaacccgtctctgcgtcaccgtacctggcagattgcgatggacggcagccagaagttaccgcagcgtctgctggacccggtgcgtctgcacctgcaaaacggcggcagctggcgtcacctggcgctgggcgtggctggctggatgcgttacacccagggcgtggatgagcagggtaatgccattgacgtggtcgacccgatgctggcggagttccagaagatcaacgcgcagtatcagggcgcagaccgcgtgaaagcgctgctgggcctgagcggtatttttgccgatgatctgccgcagaatgccgactttgttggcgcagtgacggcggcatatcagcagctgtgcgaacgcggtgcgcgcgagtgtgtggctgcgctgtaactaactgattaccctacagacttactggtcaatcaaactgatatttggttgaccagttttcgtttttttgcccacctgtacgtgccaacttccagtgctaatggtatagtttgagattaacgggggccgtaaaattgcccgttgtaggccggataaggcgttcacgccgcatccggcaaaaatttgattaaccgcacctaacggacacaacaccatgaaatctgccacctctgcgcaaagaccttaccaggaagtcggggcgatgatccgcgatctgatcataaagacgccgtacaatcctggcgaacggctgccgccggagcgtgaaattgcagaaatgcttgatgtcacgcggacggtggtacgtgaagcgctgatcatgctggagatcaaagggctggtggaagtacgccggggtgccggtatctatgttcttgataacagtggcagccagaacacagacagtccggatgccaacgtctgcaacgatgccggtccttttgagctgttacaggcgcggcagttattggagagcaacatcgccgagtttgccgctttgcaggctacccgcgaagatatcgtcaaaatgcgtcaggcattgcaactggaagagcgtgaactggcttccagtgcgccgggcagcagcgaaagcggtgacatgcagttccatctcgctattgccgaagcaacgcataacagcatgctggtggagctgttccgtcagtcctggcagtggcgggaaaacaatccaatgtggatccagttgcacagccatctggatgacagcctgtatcgcaaagagtggttgggcgatcacaaacagatcctcgccgcgttaatcaaaaaagatgcccgagcggcgaagctggcaatgtggcagcatctggaaaacgttaagcaacgtctgctggaattcagcaacgttgacgatatttattttgatggctatctgtttgatagttggccgctggataaagtcgacgcctgacttattataataagcgcaagggtaaacgttccttgcgctttcttaaattaagaagtcgcaatgagtattactttgtaaattgcagggtattgtttagctatctgtataacctgaatgttagtactcattcttcctggtagtaaggcgagattattaaagttgccatgcagcgtccggggaagtgttgggcgctgttttttttgtttcttaataatgtgttgtaagccgtagaaggcgtgtaggtcgcaccctatgcgacctacacatcagtcaggaattacccttcacgttctaccactttaatttccaccatgccgatcccgagcttacgcgggctgtgtccgaggatattcccttcgttggtactgacaggttccggcggcacaattaccagtgtgtcggcatcggttgggttatcgaaatgcagtgtggtggtggtcacttcattgcccagcacaagagtttgttcttcattgcctacgcgtaccggaataggacggctggcgttattgccgtatgctttggcggtaatcaccaggtcaaatttcttcggcagcggatgcttgtactcgatttttacttcatcgcccagctgcgcgttggaccagcggccccagctctccggacgggaaatcccgctaaactgtttcacctcttctggcgcaccggcgacgttaaagatgaaactgtcggctttgtagcgaatatcgttatcaacaatcttcagcgtatcgacattgcctttgtaacgcgccatgtcgatgaccgtatctttaaatgccgttttgccctgccatgttgttttgtcaacatgctgaacaatttgctgaccgccaagctgcccttggctgacacaccagtcggtggaaagtgccagttccggagcccagagttgtgccatcttgtagcaacggtcaacccagacgaaattgtcgcgtggagcgaaatcggccagctggaaacgcagcggtgcactgtattcgctttccggcagcggttccacgcgtttgtcactaacccgcaacagcagcggcaaacggaaatggctaccgctgaaggcaatcatgtttttctgctggtcgatggtgaactctttcatctctttagggaatttccacaggcggatgatatctggcttccacgccaatgttttctctttgatattgaggaagatttcgctcatgctctgcccggataaactgctacgaccaagtccgagatagttatcgccaccgagaatgtccagcaccgtcgcgccgttatccatcgtgttacgcttcactgccagcgtctcttgctgcggcttgtcgccacgaatgacaaaaaacaggttattgcgatcctgcttattgaggtatttccacgccgtgttgttcatcgctaaatggtcagaagagacgacgatgacggtatctttaaaccacggactcgctttgattttgttgataaacgtcgcgatgttctcctggctgcaacttaccgcgctgaaactctgattcggtttaccgtcaaaatcatattttttgcggttacaggtacgagagataaaaccatccgggtgatgggtatcgactgtcagggtaaacagactgaatcgctgaccactgcgggaaagctcttcaaactttttccacgcttcatcgagaacggtatcgtcgtagaatccccagtcgttgcgatagtgcgggtcggctaccacgcttttcagctcttcactgccgtataagtggtcgaagccatggctcttcaggaacacatctttaccggcaaaacgcagattcgcgccctgcacgaaatagttctgataaccgctgtttttcaggatatctcccagacagatgttctgcgggaagaagctggagacagaggcggaggcgttgccttcaaagggggcaaacagcggtatgccgcactgagaagccaccatgcccgcaatcgtgtaatctgttcccggcagctgctgcgtgtggctgaaatccaggccttcatttttcaacgcgcccagttcaggcgtgagatccgggaaagcctcgttatcaaaataggtccgctcgagactttcgccgtagatataaaccaggttgagtttcgggtcagggatagttttgctcggctctttataataagccgcaaagtccgggtcgccgtcgcgactctgggatttcaccagttccgttatctgacgaaatgccgggctggcgtccacgctacccagcgccagtaagagcgccagcaggctgtaaccaaaatggtgcggatgatggcgacgacggcgcaggatccagcccagcgcaccgaacaccgctgtcagccccagcacaatgccgatacccggcaaaatgtatttgctgacgccagcaccggtcaggctgttggttaaggtatagagaaccgcgtcgttaataccatcgccagtaaaatagtcgctggcaaacagggtgatatttaaaacgacaaatagccccagcaccgttaacgtggctgcaaaccaccaggtgttacgtcccgctttccatgcgtaaatcagcacagaggcgagaaaaagggcgaaagagagtagttcactcaacgggcgatcctcactaaaccgggccgtttagccaacgtttaagctttttgagaagcacaatgtaatggcgtcgccatattgctgcaattctagtgtcaaaaaaatgcgatgttgttaggaattagtttataaacagacttttttgattacggtcacttcccgtgtaacaggggtaaaaccgtccaggagcagggaaaagggcaggagagagccgcgtcagccgggtaacagctaaaacgcggcgtttcgcggttcaggaaatgaagttcagcccctgttttaacaccagatcgcaggctttggttttcaccttttctgccagcggagttgttccgatgttatccagattgagttgctgaccatctttggttttcagcaaaccctgaatgccgtccagatagttggtgtcttctttttgctcttcactgttcaggcccagcttttccagcacctggttcttgatgttttcggcatcggttacgctcgccagcttttgcttcgcgcagtattgcagaatgcctgcggcattgttcatgttatctgcgcttaaggcctggtttccgctgctaagcaagttagttaaactcgcgaggctccaaccgccttcctgtgtcgtgctgttttggttgccaagttcgctggcggcgctggagagcgcatctttccaggacgcagcatgcaccccggtggaaattaatgcgctggcggcaatggcacagcacagaagatgtttaacagttttcatcatcattactcaaggtggaattgtgtcgcagtataccgccagaaacggggattaatactctttacctgttacccggctacggtagctatcccagttgaagatcacccacaaactgttacccaggcgcatacggtccatcacgcgttcgcccagcaacttggtcatctcttccatattactgttggtcagcatcccggttgggcgtttggaagaagagcggcgatcgacgatctggttgatgatcactttttcgtatttgctttcggtctgcacgccgatctcatcgatcaccagcagatcaacgttgctcagatcgttaagcagttgttcttcgctggtaccgctattcctgaaggtatctttcatcgcgctcataatatcggccacggtgatgatcaatacggatttaccgcgtagcagcagctcgttgcagattgccgccgccagatggtttttgccggttcctggcttaccagaaaagatgaagctggcgatgttgccgtcaaactcttcgacatactggcgcgctttgcttaacgcattcatctgcccttcacactcaacgcgatagttctcaaaggaacagttctgatgcagtggacgaataccggagcggttaaaggtgcgctgcattttcatcgcccgattttcacgttcgagagcggcggagcggatcgctccttgttctttttgccaggccagtagttcttcacccgttttgaatgcgggtttgatatgggcaggcatcattttttgcaggcgttgcatcaggtcgccaacgtttttcatcgttaccctctgaatcctggtggaatttggctgtcaggttcgctgaccgtattcacatctcgtttcggcagtccgccgttgctggcacgaccgatttgcaggctgcgcgccagtttttgttgccactgcacatggtgaaagactttaccttccgcctgccagtaggcaatgaaactggccagttcttcggtggtcaccggctctcttagcgccacgccccatagcgccgccaggcggataaaatcggcatcgggttgccagtccggatacatggcgaatttccccatgggtacagcaacgggagcggcttgcggttcctgatagagttgatcgtccagagcgacatcgcttcccggacgcgccagcttttcttccagcgccagcagttcagccaggcgtgcaggcgtgacggcataaaacgccggggcattgttagcaaatacggcaaccacaccgccttcagcttttgccagaacggtttggtgatcgtgtaccagggcgtcaataccaacgacgtccggggtcaaaactctggaagacatactgtttctcaaatatggaacgatgaacgagaagggagataacttttatagtaacacacggaggagaggaggctgtctctcatccgtgtgcttaagcgaggcaattttatacgcgagggcgcttgcggtacaaccataatccaggaatggaaagaccgatggataacgcaccaacaatgctactagctgtaagaaagttggttaacagggtaatcatcaacggttcgctgtaacctaactggctgatttttaccgcgctaatcattgcggtataagcgcttatgcccgggaacatagggataacggccgccacggtaaacactttcggatgcgccagataccagcggctccattgaataccaatggtaccgaccagcatagaagccataaaggtactccactcaatattcaacccgctggtcatcaagatcattcgggaaccatgacctatcgagccaagcagcgcacaccagcgtaacgcccgcacgggaacgttgaacaccatcgcaaagccgaccgcaggaatggcggcgaggatcatatcctgcgccaacgctaacagaaattcgatcacacccatccgcgtagcccccaaatcgtcagtgccatcactacgccgacgcaggtagccagtgtcagcagactggcgatcgcccagcgtgccagtccggtattgatgtggcctttaaacatatcggcgacggcattaatcaacggaaagcccggcactagcagcagaacgctggcggccatcgcaatggtgggggtattgctgaaagtggggagttgcaaaagcaatccggaaatggtggtggcggcgaaagcggtaaggcaaaagttgatctgtggatgaagatgacgttgtgccagcagctggcggatatacatcgcggtcgtactggcaaagaaggtgatgacggcaccatcccagccaccgttattgagtttacagaaacaggcgcaagaaaggccaaccattaaggctaccagccatcttgggtaacgtaatggctgaatttggctaaatcgtttctctacgcctttgtaatccagcagatgatgctccgcaagaatcacaatgtgctggacttcagtcaccacatgcatattaatgccgcgatcgtgatttttacgtgtgcttgtcaggcattgcccatctttaatagttgtcagcactatggcgttgctagagatagaactttcgacgctgtccattcccagtgcccgacccagtcgactggaaagctcatcaaccaacgcgctttccgcaccatgttgcaaaagaaataatccacactggatacaaagccgtgttacggctcgctgttgctcagtttgcataactcgccctttgtcatagacgtgctgcgtattgttcagataatgagaatccatttgtatcatgaagcacggttgttttgcggtaggttaagatcaaaattgcgctgattaatcctggttatcgggagaagctcggtgataaaaagcgaattatctctcgccgcaaacaaactatcacatgaatattatcatcataatgaatttattgtttggcctttacgaatcaggataatagataaccgggcacgttttttaatgttaacaagctaaaaccatcagatttcattgaataaatattggttgtgtgattttgcattctgcgggaagggatatcatttaattataaattaaatgaatgtgatttctgtttttcattaagtattcctaacaacttaatgtagatattttaaatgtctccaggctatttcaccaggttatcatttgatgctaaccttctgacacatgcagtggagttgttgtgcagcaggagtatgctgatatgaaagtgaatgctaaggataatttattcgcttaatctattaatttgctggaaacatttaaggaatgaatatcctgaataaaccatcataatttttagacagtggatgtggaggaaatatgttgccaggatgctgcaaaaatggaattgttatcagtaaaatacctgttatgcaagcagggttaaaagaggtcatgaggactcacttccctgaatatgaaataatatccagcgcctctgcggaggaccttaccttattacaattacgtcgttccggattagtcattgctgatttagccggtgaaagtgaagatccacgttctgtttgtgaacattattattctttaatcagtcaatatcgggaaattcactgggttttcatggtgagtcgctcctggtattcccaggcagtagaactgctcatgtgccctacggcgacgttattgtctgatgttgaacccattgagaatctggtcaagaccgtacgttccggcaatacgcacgcagagcgtatcagcgccatgctgacctccccggcaatgactgaaactcatgattttagctatcgctccgtcattctcactcttagtgagcgcaaggtactgcggctattaggtaaaggatggggcatcaaccagatagctagtttgcttaagaaaagtaataaaactatcagcgcccaaaaaaacagtgcgatgcgtcgactggcaattcacagcaacgctgaaatgtatgcatggataaatagcgcgcagggtgcaagagaacttaacttgccttctgtttatggagatgccgcagaatggaacacagccgaattaagaagagaaatgagccacagttaaaaaaatgcgtcatgagtagtatcggtattgagagtttattcagaaagtttgcgggtaacccttataagctccatacctataccagtcaggagagttttcaggatgccatgagccggatcagctttgcggcggtcattttttctttttctgccatgagaagtgagcgcagagagggattatcttgcctgactgaactggcgattaagtttccgcgtacccggcgtttagttattgcggatgatgatattgaagctcggctgattggtagtttgagcccaagtccgctggacggtgtattaagtaaagcgagtacgctggagatttttcatcaggaactctttttgagtttaaatggtgtacgtcaggcgaccgaccgactgaacaatcagtggtacattaaccaaagccggacgttaagcccgacggagagagaaatattgcgctttatgagccgtggctacagtatgacacaaattgccgagcagcttaaacgcaatatcaaaacgatccgtgcacataaatttaatgtgatgagcaaactgggcgtcagttctgacgcagggttgttggaggccgcagatattctgttatgtatgcggcattgcgaaacaagtaatgtgttgcatccctattaatccgcatgatgccgggtttacttccccggcagtgctttcatttcagcgtacaatcgccacattgctgcacatccggtaagcgataacgctggcagcaagtgcggcgcaccagcaggccgtcgcgcagtaccacggtacgccagagtggattatcttcaccgttcgtgagcgttttctcaaaaaagagggcatggcgcaggctttcaacagtagcctcgccgagcagttgcttcatctcagtgagataccagttgatcaaataaccggtattactccagataagtttgccgttgatctctccggtcgcttctagtgcttgcacaaccggaaccagcgcctggctgattaacgtttccattcgatgctgcgggctatgtggtgttgcgtttttatcttcacacacatcgacccagaaacaggcgacgcgtccggtttcgtgaaactcagcatggaaatgttccgggctcacatctaatgccttttcctgcgtcagtagcgccagcattaatggtggcaccatcaggccgatataccattgtgcccatagactgatcagcggtttgttctcgcggatcatcatcggttggttgcgatagatatgatcggaatagaccgccagcagagaacttagcacattcggactactccattgcgccagcgtcatggcgttaagtggggcaggttcatccaggcggataaactccagcaaatgttcacgatgttttgcgatcgtcgcccgcacggcttgcgcaagcgtgggatcctgcggctggagatgcgttcgccagatgacatcttcatagagcggtgcggaacgataggccataatcgggatagtaatctaaatgataatgattgctaatcatagcgataggtttacccgatagcaagggatttatctggcttgcaaatgataaaaattatcatatgatattggttatcattatcaatgaaagagatgaaatcatgttgcaacgtacgctgggcagtggctggggagtgttgctgccgggattgctgattgcggggctgatgtatgcggatttaagcagtgatcagtggcggattgtcattctgatgggattagtattgacgccgatgatgctgtatcacaaacagttgcggcattacattttgctaccaagctgcctggcacttattgctggcatcatgctgatgataatgaatttgaatcagggatgaaaaatcaaggaagaaacaagaaaggaagtaaagataattggtgcgaggggggggacttgaacccccacgtccgtaaggacactaacacctgaagctagcgcgtctaccaattccgccaccttcgcacagtcatcttactttttttgatatcgcctcgtttggtgcgaggggggggacttgaacccccacgtccgtaagaacactaacacctgaagctagcgcgtctaccaattccgccaccttcgcccagtgcgagcaatatcaacgtggtttttggtgcgagggggggacttgaacccccacgtccgtaaggacactaacacctgaagctagcgcgtctaccaattccgccaccttcgcataccatcaattcttaaaaagaattgctaccacggaggcgcattctagtggttttcagcttttcgtcaatagttaattatcgacagaggtgtaattgctggaaaaatgtccatcaggaaactagcgtgcaggtttggtatgcatgcgggggcagatgccagatgcgacgctggcgcgtcttatctggcctacgaagggctaacgtgcaggttttgtaggtcggataaggcgttcacgccgcatccgacacggtattcggcgagataattaacctttcttcgcctggcgggtcataatggcgcgatacaccttgaagcgccctgtttgcgcgatcacttcgtggaagccaaatgtctcatccagcacgtccggataaggcaggaaggcgttcgctacaattcgcagctcgccgccgctattaagatgacgcaccgcaccgcgaatcagcgtttgcgccgcatccaggctggtttgcatcccatcgtggaacggcgggttggagatgatcatatcaaaacgacctttcacctcggaaaagacgttgctggcaaagacttcaccttcaacaccgttggccgcaagtgttgcgcggctggcttctaccgccggggcagagacatcgcacaaggtgagacgaattttcgggctatggcgcgcaaaggcaacactaagcacgcccgcgccacagccgacatccagcactttacctttcgtgtgcggagttaacgtgctgagcagcaactggctaccgacatccagaccgtcgcggctaaacacgccaggcagcgttttgaccgtcaggccatcgacgctgtattcgccccagaatttctccgcatcaaataccggctgtttttccagacgaccaaaatagaggccacagcgacgagcgctgtcgactttattcaacggcgcataatctgccagcatctgctcggcgctgcgcacgccgctgcggttctcgccaacgacaaaaatatctgtccccactggcagcagagaaagtaaattcatcaactggaactgggcttccggtttgttcttcggccagtagtaaatcagcgtatcgcaatctgcgacgtcatccgccgtggcgaccagactgaaacgggcgttatcccccatctggcggcttaatacctgccagtggtggaattgctgggtatgagcacggctggccgcggtatctaaacgcgcgggcaggtcatcctgtaagtctccggcaaacagaatacggctttgttcgaaatcatcactgtgacgcagcaagacttcacttgccggggtaaatgcagacatggaatgctcctcaattgatactggcggcgattatagccatatgttggcgcggtatcgacgaatttgctatatttgcgcccctgacaacaggagcgattcgctatgacatcccgacgagactggcagttacagcaactgggcattacccagtggagcctgcgtcgccctggcgcgttgcagggggagattgccattgcgatcccggcacacgtccgtctggtgatggtggcaaacgatcttcccgccctgactgatcctttagtgagcgatgttctgcgcgcattaaccgtcagccccgaccaggtgctgcaactgacgccagaaaaaatcgcgatgctgccgcaaggcagtcactgcaacagttggcggttgggtactgacgaaccgctaagtctggaaggcgctcaggtggcaagtccggcgctcaccgatttacgggcaaacccaacggcacgcgccgcgttatggcaacaaatttgcacatatgaacacgatttcttccctcgaaacgactgatttaccggcggcttaccacattgaacaacgcgcccacgcctttccgtggagtgaaaaaacgtttgccagcaaccagggcgagcgttatctcaactttcagttaacgcaaaacggcaaaatggcggcgtttgcgattacgcaagtggtgctggatgaagctacattgttcaatattgcggtcgatcctgactatcagcgtcagggattgggaagggcgctgctggaacatctgatcgacgaactggaaaaacgcggcgtggcgacactatggctggaagtccgtgctagtaacgctgccgccattgccctgtacgaaagtttaggctttaacgaggcgacgattcgccgcaattactaccccaccacggacggtcgcgaagacgccatcatcatggcgttgccaatcagtatgtaatacaaggtggaataatgaagtgggactggattttctttgatgccgatgaaacgctgtttacctttgacagtttcaccggcctgcagcggatgtttcttgattacagcgtcacctttaccgctgaagattttcaggactatcaggccgttaacaagccactgtgggtggattatcaaaacggcgcgatcactagtttacagcttcagcacgggcggtttgagagctgggccgaacggctgaacgtcgagccaggtaaactcaacgaagcctttattaatgcgatggcggaaatctgcacgccgctgccgggcgcggtttctctgcttaacgccattcgtggcaacgccaaaatcggcatcatcaccaacggctttagtgccttgcaacaggtgcgtctggaacgcacgggcctgcgtgattacttcgatttgctggtgatttccgaagaagttggcgttgccaaaccgaataagaaaattttcgattatgcgctggaacaggcgggcaatcctgaccgtagtcgcgtgctgatggttggcgacactgccgagtccgatattctcggtggcatcaacgccgggcttgcgacctgctggctgaatgcacaccatcgcgagcaaccagaaggcatcgcgcccacctggaccgtttctagcttgcacgaactggagcagctcctgtgtaaacactgattgcctcccccccgttgatgggtaaaatagccgcaatttttcgttttcaacaagcgcggcgcgatgccgcttactcaagaagaaagaattatgacgttgtctccttatttgcaagaggtggcgaagcgccgcacttttgccattatttctcacccggacgccggtaagactaccatcaccgagaaggtgctgctgttcggacaggccattcagaccgccggtacagtaaaaggccgtggttccaaccagcacgctaagagcgactggatggagatggaaaagcagcgtgggatctccattactacgtctgtgatgcagtttccgtatcacgattgcctggttaacctgctcgacaccccggggcacgaagacttcagcgaagatacctatcgtaccctgacggcggtggactgctgcctgatggttatcgacgccgcaaaaggtgttgaagatcgtacccgtaagctgatggaagttacccgtctgcgcgacacgccgatcctcacctttatgaacaaacttgaccgtgatatccgcgacccgatggagctgctcgatgaagttgagaacgagctgaaaatcggctgtgcgccgatcacctggccgattggctgcggcaagctgtttaaaggcgtttaccacctttataaagacgaaacctatctctatcagagcggtaaaggccacaccattcaggaagtccgcattgttaaagggctgaataacccggatctcgatgctgcggttggtgaagatctggcacagcagctgcgtgacgaactggaactggtgaaaggcgcgtctaacgagttcgacaaagagctgttccttgcgggcgaaatcactccggtattcttcggtactgcgctgggtaacttcggcgtcgatcatatgttggatggcctggtggagtgggcacctgcgccgatgccgcgtcagactgatacccgtaccgtagaagcgagcgaagataaatttaccggcttcgtatttaaaattcaggccaacatggacccgaaacaccgcgaccgcgtggcgtttatgcgtgtggtgtccggtaaatatgaaaaaggcatgaaactgcgccaggtgcgcactgcgaaagatgtggtgatctccgacgcgctgacctttatggcgggtgaccgtagccacgttgaagaagcgtatccgggcgatatcctcggcctgcacaaccacggcaccattcagatcggcgacacctttacccagggtgagatgatgaagttcaccggtattccgaacttcgcaccagaactgttccgtcgtatccgcctgaaagatccgctgaagcaaaaacagctgctcaaagggctggtacagctttccgaagagggcgcggtgcaggtgttccgtccaatctccaacaacgatctgatcgttggtgcagttggtgtgctgcagtttgatgtggtggtagcgcgcctgaagagcgaatacaacgttgaagcagtgtatgagagtgtcaacgttgccactgcccgctgggtagaatgtgcagacgcgaagaaattcgaagagttcaagcgtaagaacgaaagccaactggcgcttgatggcggcgataacctcgcttacatcgctaccagcatggtcaacctgcgcctggcacaggaacgttatccggacgttcagttccaccagacccgcgagcattaattcttgcctccagggcgcggtagccgctgcgccctgtcaatttcccttccttattagccgcttacggaatgttcttaaaacattcacttttgcttatgttttcgctgatatcccgagcggtttcaaaattgtgatctatatttaacaaagtgatgacatttctgacggcgttaaataccgttcaatgcgtagatatcagtatctaaagccgtcgattgtcattctaccgatattaataactgattcagaggctgtaatggtcgttattcatcactcatcgcttttgtgatggcgaccattgacttctgtagagggtgaagtctctccctattcagcaatgcaacctcgtgttgccaggctcaaattacgagcaaacatacaggaataaatcgatgactatgacaagactgaagattagcaaaactctgctggctgtaatgttgacctctgccgtcgcgaccggctctgcctacgcggaaaacaacgcgcagactaccaatgaaagcgcagggcaaaaagtcgatagctctatgaataaagtcggtaatttcatggatgacagcgccatcaccgcgaaagtgaaggcggccctggtggatcatgacaacatcaagagcaccgatatctctgtaaaaaccgatcaaaaagtcgtgaccctgagcggtttcgttgaaagccaggcccaggccgaagaggcagtgaaagtggcgaaaggcgttgaaggggtgacctctgtcagcgacaaactgcacgttcgcgacgctaaagaaggcagcgtgaagggctacgcgggtgacaccgccaccaccagtgaaatcaaagccaaactgctggcggacgatatcgtcccttcccgtcatgtgaaagttgaaaccaccgacggcgtggttcagctctccggtaccgtcgattctcaggcacaaagtgaccgtgctgaaagtatcgccaaagcggtagatggtgtgaaaagcgttaaaaatgatctgaaaactaagtaattcgtcgtaattcgtcctcccgaactttgtcgggaggcgcgatgtgcaccacactaaaaatatcgcattgagtgattttcacgctcatatcaagcggtgacattaactatggtaaaggagacgcttatgtttcgttggggcatcatatttctggttatcgcgttaatcgccgccgcacttgggtttggtggtctggccggtaccgctgcaggcgcagctaaaattgtctttgtcgtcgggattattctgttcctggtgagtttgttcatgggccgaaaacgaccctaaatttcagaccattaagaaaattttatccaaagccagtccagcggactggcttttgcggttttagcgaataataaattgcgttactttgtcattctttcacaacaaaaacaggaaggcagaggtggggcagcgaatacctgtaacgcttggtaatattgcgccgttgagcctaaggccgttccagcctggacgaatagctctggtgtgcgaaggcggcggacagcgtggaattttcacggctggcgtgctggatgagtttatgcgcgcgcagtttaatcctttcgatctttatctcggcacatctgccggggcgcagaacctcagcgcgtttatctgcaatcagcccggttacgcgcgcaaagtcatcatgcgctataccacaaaacgcgaatttttcgatccattgcgctttgtccgtggaggaaatcttatcgatctcgactggctggtggaggccactgcaagccagatgccgttgcaaatggataccgccgcgcggttgtttgacagcggcaaaagcttttatatgtgcgcctgtcgtcaggatgactacgcgccgaattactttttaccaaccaaacaaaactggctggatgtgattcgcgcctccagtgcgatacctggcttttatcgtagcggagtgagcctggaaggcattaactacctggatggcgggatcagtgatgcgattccggttaaagaggcggcaaggcagggcgctaaaacgttggtcgtcattcgcactgtgccgagtcaaatgtactacacgccgcagtggttcaaacgcatggaacgctggctgggtgacagtagcctgcagccgctggtcaatctggtgcagcatcatgaaaccagctatcgtgacattcagcaatttattgagaaaccaccgggcaagctgcggatattcgaaatttatccgccgaagccattacatagtatcgcgcttggcagtcggattccggcgctgcgtgaagactataaacttgggcgtttatgcggtcgttatttcctcgccacggttggcaagctattaactgaaaaagcgccgcttacccgccatctggtgccagtggtgacgccggaaagcattgtcattccgcctgcgccagtcgccaacgatacgctggttgccgaagtgagcgacgctccgcaggcgaacgacccgacatttaacaatgaggatctggcttgatttgccgttttatcgacacccactgccattttgatttcccgccgtttagtggcgatgaagaggccagcctgcaacgcgcggcacaagcgggcgtaggcaagatcattgttccggcaacagaggcggaaaattttgcccgtgtgttggcattagcggaaaattatcaaccgctgtatgccgcattgggcttgcatcctggtatgttggaaaaacatagcgatgtgtctcttgagcagctacagcaggcgctggaaaggcgtccggcgaaggtggtggcggtgggggagatcggtctggatctctttggcgacgatccgcaatttgagaggcagcagtggttactcgacgaacaactgaaactggcgaaacgctacgatctgccggtgatcctgcatagtcggcgcacgcacgacaaactggcgatgcatcttaaacgccacgatttaccgcgcactggcgtggttcacggtttttccggcagcctgcaacaggccgaacggtttgtacagctgggctacaaaattggcgtaggcggtactatcacctatccacgcgccagtaaaacccgcgatgtcatcgcaaaattaccgctggcaagcttattgctggaaaccgacgcgccggatatgccgctcaacggttttcaggggcagcctaaccgcccggagcaggctgcccgtgtgttcgccgtgctttgcgagttgcgccgggaaccggcggatgagattgcgcaagcgttgcttaataacacgtatacgttgtttaacgtgccgtaagccggataaggcgttcacgccgcatccggcagttggcgcacaatgcctgatgcgacgcttaacgcgtcttatcatgcctacaggtttgtgccgaaccgtaggccggataaggcgttcacgccgcatccggcagttggcgcacaatgcctgatgcgacgcttgtcgcgtcttatcatgcctacaagtctgtgccgaaccgtaggccggataaggcgttcacgccgcatccggcagtcggcgcataatgcctgatgcgacgcttgtcgcgtcttatcatgcctacaggtttgtgccgaaccgtaggccggataaggcgttcgcgccgcatccggcagttggcgcacaatgcctgatgcgacgcttgacgcgtcttatcaggcctacaagtctgtgccgaaccgtaggccgtatccggcatgtcacaaatagagcgccggaaatatcaaccggctcaccccgcgcacctttaacgcatcagccaacggctcaacgtcttccggcgtggcgctcgcccagctttgcgcctcgccatacacgccgtgggcatgaaacgcgttcaggcgtaccggaacatcgccgagtcccttgataaacgccgccagttcttcgatgtgttgcaaataatccacctggccagggatcaccagcaaacgcagttccgccagcttgccgcgctctgccagcaaatagatgctgcgcttaatctgctgattatcgcgtccggtgagttgttgatgacattcgctcccccacgctttgagatcgagcattgcgccgtcgcacaccgggagcaatttttcccagccggtttcgctcaacatgccgttactgtccaccagacaggtgagatggcgcagttgcggatcgtttttgatagcagtaaacagcgccaccacaaacggcagctgggtcgtggcttcaccgccactcaccgttatcccttcgataaacagcactgctttgcggacatggctaagcacttcgtccacgctcatggattgcgccatgggcgtggcatgttgcggacacctcttcaggcaggtatcacactgctcgcaaaccacagcgttccacaccactttgccgtcaacaatctgcaacgcctgatgcggacactgtggcacgcactccccacagtcattgcaacgtcccatcgtccacggattgtgacagtttttgcagcgcagattgcagccctgcaaaaacagagccagacgactgcctggcccgtcaacgcaggagaaggggataatcttactgactaaagcgcatctgctgttcatggcttatcacgcgcggctggcgttccagaatacgagtgttgcgtgcggcttcttcgcccagccaggtggtgttggtgcgactaccttcggcgcgatatttttctaaatcgctcaaacgcaccatataaccggtaacgcgaaccagatcgttaccgctgacattggcggtaaattcacgcattccggctttaaaggcaccgaggcaaagctgtaccagtgcctgcgggttacgtttgatggtttcgtcgagcgtcagaatgtcgctgatgccggaataataataagcatgatgcggggcgacagtttgcagatgggtgatcggatctggctcatcgccatacggcaaacgcgcgcccggcgtggtgccgatatcggaactgatcccgctctgtgcgtgtaacatggcgcgtttttgccagccatatttcacgggggtattggcgacaaactccgccagttgcgcgctgatgcgataacctacttcatttgcggcggcttctttaccgtagcgcgcggcaatcccttctttttcacacagcaagttaaccgcttccgccagcccatacatgccaaacattggcacaaaacgttcagggttaatcagcccttctttcaccaggaagctattctcaaagaagtgactttgttgatagaggaattcacaccgcgcatcgatgatggcgatctgctgctggcagtagtgcggtagagtgcgcgtaaagaagtcatccaggctttcgctgcgctcggcaatggctttcaggttaaggcgtaccagcgtgctgccaccacccgccagcggcagactgttgtaacagctcacaatcccgtagcccccttttgtgaaaattttatcatgcaccggaccgttggcgatgtgcggtttgctacattcacagatgttcttcgccacttccagcagcaggtcatcaggggtgatttcaggatcgtagataaaggtcaggttcggactaacctgcttcaactctgcatctgcacgtaagatcgcgcgggtaatggggctatcagacgggccgatattggcgtgcataaaggcgtctggcagggttctgtcgaggtaacgccagaaacgttttattcgaacatcgatctcgtcttgtgttagaattctaacatacggttgcaacaacgcatccagttgccccaggtagaccggcatgcttgtgacgctcggtacgtggtggtaaagaatggtcagcagagagagtgcgtcatcaagatctttcgcgccttccagctccagccattcggaaccgttcgccagaaaacgggcgtaatcgggtaagacatagcgcggtttgtacggcgcatgaccttcaaacatatcgcagattacaccttcatccagcgcgcggcgggcttcggcaggaagctgtgggtaaggcagattgttttctgcttccagtgccagaaaatggcgcttctgctccgggctaagcactgggctggtgacaatttgctggcaacgttgttgcagtgcattttcatgagaagtgggcatcttcttttccttttatgccgaaggtgatgcgccattgtaagaagtttcgtgatgttcactttgatcctgatgcgtttgccaccactgacgcattcatttgaaagtgaattatttgaaccagatcgcattacagtgatgcaaacttgtaagtagatttccttaattgtgatgtgtatcgaagtgtgttgcggagtagatgttagaatactaacaaactcgcaaggtgaattttattggcgacaagccaggagaatgaaatgactgatctgaaagcaagcagcctgcgtgcactgaaattgatggacctgaccaccctgaatgacgacgacaccgacgagaaagtgatcgccctgtgtcatcaggccaaaactccggtcggcaataccgccgctatctgtatctatcctcgctttatcccgattgctcgcaaaactctgaaagagcagggcaccccggaaatccgtatcgctacggtaaccaacttcccacacggtaacgacgacatcgacatcgcgctggcagaaacccgtgcggcaatcgcctacggtgctgatgaagttgacgttgtgttcccgtaccgcgcgctgatggcgggtaacgagcaggttggttttgacctggtgaaagcctgtaaagaggcttgcgcggcagcgaatgtactgctgaaagtgatcatcgaaaccggcgaactgaaagacgaagcgctgatccgtaaagcgtctgaaatctccatcaaagcgggtgcggacttcatcaaaacctctaccggtaaagtggctgtgaacgcgacgccggaaagcgcgcgcatcatgatggaagtgatccgtgatatgggcgtagaaaaaaccgttggtttcaaaccggcgggcggcgtgcgtactgcggaagatgcgcagaaatatctcgccattgcagatgaactgttcggtgctgactgggcagatgcgcgtcactaccgctttggcgcttccagcctgctggcaagcctgctgaaagcgctgggtcacggcgacggtaagagcgccagcagctactaagtaagatgctttacgcctgatgcgctgcgcttatcaggcctacgagacgtatctacccgtaggccggataaggcgtagacgcatccggcaaaagccgcctcatactcttttcctcgggaggttaccttgtttctcgcacaagaaattattcgtaaaaaacgtgatggtcatgcgctgagcgatgaagaaattcgtttctttatcaacggtattcgcgacaacactatctccgaagggcagattgccgccctcgcgatgaccattttcttccacgatatgacaatgcctgagcgtgtcagcctgaccatggcgatgcgagatagtggaaccgttctcgactggaaaagcctgcatctgaatggcccgattgttgataaacactccaccggtggcgtcggcgatgtgactagcctgatgttggggccgatggtcgcagcctgcggcggctatattccgatgatctctggtcgcggcctcggtcatactggcggtacgctcgacaaactggaatccatccctggcttcgacattttcccggatgacaaccgtttccgcgaaattattaaagacgtcggcgtggcgattatcggtcagaccagtagtctggctccggctgataaacgtttctacgcgacccgtgatattaccgcaaccgtggactccatcccgctgatcaccgcctctattctggcgaagaaacttgcggaaggtctggacgcgctggtgatggacgtgaaagtgggtagcggcgcgtttatgccgacctacgaactctctgaagcccttgccgaagcgattgttggcgtggctaacggcgctggcgtgcgcaccaccgcgctgctcaccgacatgaatcaggtactggcctccagtgcaggtaacgcggttgaagttcgtgaagcggtgcagttcctgacgggtgaatatcgtaacccgcgtctgtttgatgtcacgatggcgctgtgcgtggagatgctgatctccggcaaactggcgaaagatgacgccgaagcgcgcgcgaaattgcaggcggtgctggacaacggtaaagcggcagaagtctttggtcgtatggtagcggcacaaaaaggcccgaccgacttcgttgagaactacgcgaagtatctgccgacagcgatgctgacgaaagcagtctatgctgataccgaaggttttgtcagtgaaatggatacccgcgcgctggggatggcagtggttgcaatgggcggcggacgccgtcaggcatctgacaccatcgattacagcgtcggctttactgatatggcgcgtctgggcgaccaggtagacggtcagcgtccgctggcggttatccacgcgaaagacgaaaacaactggcaggaagcggcgaaagcggtgaaagcggcaattaaacttgccgataaagcaccggaaagcacaccaactgtctatcgccgtatcagcgaataacggtatactgatctgatcatttaaatttgaagcactgagtacggagaacatatgaaacgtgcatttattatggtgctggacagtttcggcatcggcgctacagaagatgcagaacgctttggtgacgtcggggctgacaccctgggtcatatcgcagaagcttgtgccaaaggcgaagctgataacggtcgtaaaggcccgctcaatctgccaaatctgacccgtctggggctggcgaaagcacacgaaggttctaccggtttcattccggcgggaatggacggcaacgctgaagttatcggcgcgtacgcatgggcgcacgaaatgagttccggtaaagataccccgtctggtcactgggaaattgccggtgtcccggttctgtttgagtggggatatttctccgatcacgaaaacagcttcccgcaagagctgctggataaactggtcgaacgcgctaatctgccgggttacctcggtaactgccactcttccggtacggtcattctggatcaactgggcgaagagcacatgaaaaccggcaagccgattttctatacctccgctgactccgtgttccagattgcctgccatgaagaaactttcggtctggataaactctacgaactgtgcgaaatcgcccgtgaagagctgaccaacggcggctacaatatcggtcgtgttatcgctcgtccgtttatcggcgacaaagccggtaacttccagcgtaccggtaaccgtcacgacctggctgttgagccgccagcaccgaccgtgctgcagaaactggttgatgaaaaacacggccaggtggtttctgtcggtaaaattgcggacatctacgccaactgcggtatcaccaaaaaagtgaaagcgactggcctggacgcgctgtttgacgccaccatcaaagagatgaaagaagcgggtgataacaccatcgtcttcaccaacttcgttgacttcgactcttcctggggccaccgtcgcgacgtcgccggttatgccgcgggtctggaactgttcgaccgccgtctgccggagctgatgtctctgctgcgcgatgacgacatcctgatcctcaccgctgaccacggttgcgatccgacctggaccggtactgaccacacgcgtgaacacattccggtactggtatatggcccgaaagtaaaaccgggcagtctgggtcatcgtgaaaccttcgcggatatcggccagactctggcaaaatattttggtacttctgatatggaatatggcaaagccatgttctgatggatttgggcggagcgttgactccgcctttgttatgtcacaaaaaggataaaacaatggctaccccacacattaatgcagaaatgggcgatttcgctgacgtagttttgatgccaggcgacccgctgcgtgcgaagtatattgctgaaactttccttgaagatgcccgtgaagtgaacaacgttcgcggtatgctgggcttcaccggtacttacaaaggccgcaaaatttccgtaatgggtcacggtatgggtatcccgtcctgctccatctacaccaaagaactgatcaccgatttcggcgtgaagaaaattatccgcgtgggttcctgtggcgcagttctgccgcacgtaaaactgcgcgacgtcgttatcggtatgggtgcctgcaccgattccaaagttaaccgcatccgttttaaagaccatgactttgccgctatcgctgacttcgacatggtgcgtaacgcagtagatgcagctaaagcactgggtattgatgctcgcgtgggtaacctgttctccgctgacctgttctactctccggacggcgaaatgttcgacgtgatggaaaaatacggcattctcggcgtggaaatggaagcggctggtatctacggcgtcgctgcagaatttggcgcgaaagccctgaccatctgcaccgtatctgaccacatccgcactcacgagcagaccactgccgctgagcgtcagactaccttcaacgacatgatcaaaatcgcactggaatccgttctgctgggcgataaagagtaattgtgtttcgctgcaaggcgattgccttgtgaagccggagcgggagactgctccggctttttagtatctattcatttttctctccagcttgaatattttcgctatacttttcagtgaaatgtgttaataaatctattcaagtatctattcacgaatctattcattaatgagcgagctgactgatcttttactgcaagggccgcgttctgccccggaattgcgccagcgtctggcaatcagtcaggcgacgttcagtcgccttgttgccagagaagatcgggtgattcgctttggtaaagcacgggcaacgcgatatgcactgctgcgtccttatcgcggaattgagcgtattcccgtctggcgggtggacgataccggaaaggcgcataaattcgccgacatccggttgtgctggccgcagggaagttgtctggtaacaggcgcagatggcgacgaacagtggtttgatggtttgccctggtatttgaccgatctccgaccgcagggctttttagggcgcgcgtggggcaggaagttagccgcgcaactgaatctgactgatgatatacgtctctggcaggaagaagatgtgctctacgccctgaccgtatttaacggtgaatatactggcggttggttggtcggggaggggaattatcagcgatggattactgcacaacaccctgcggaaattcctctggatcaaaaactcacccattacgaacagctggcaagtgatgcactggcaggagaaattgtgggttcttctgcgggcggcgagcagccaaaatttacctactatgcacaaacgccgagtggcaataaacatgtgttggtgaaattcaccgtaccacagcaaaccgcggtcagccaacgttggggtgacctgctaattgctgaatctattgccgcgcaaatcctgcgtgacggtgggatccacgccatcgagagtacggtgcttgtaacaagtaacaggcaggtattcctcgaagcggaacgctttgactgcaaaggtaacgatggtcgcttgcctattgtgagcctggaggcggtgcagagtgagtttatctcttctccgggaagctggccgcaggcaatgcgccgtttgtgtgagcaacaacttgtcactcaccagagcgtggcgcaaacagaagtgatctgggcatttgggcgacttatcgccaacagcgatatgcacgcaggtaatttaagcttttatttatctgaaccgccatttgcgctgacgcccgtctacgacatgctgccgatggtctatgcaccaaacagcgctggaatgctgcgtgatgctgccattgaggtgaagtttgatcttaacgtcagtaaaagcgcttggttaacggcgatcccgctggcgcagcagttctggcaaacggtcgccagagatccgcgtatcagcgaggcgtttcgccacattgcgcaagaaatgccggaaaaaatccggcaaatcgaagagaaagttgcccgcatgggcgggtaattaccttacagcccccgccatccatgcgcttaactcccgtagctctttttcctgttccgggaagtcaaccaacagcgcttcgcactcctgttgcagcatatctgcgcggtacaggcagccttgcagtcgtccggcgagggcttccagcggcgcggggttgaggctgtcggtaaacacctgggcgcgggtgatatggcctttttcaacgtcgaaatgcagttccacgccgccccaggtaaagcgttcatccagcagatggctgaatgccggagcctgaccgaagttccattcccagctactctggcgggcaaaggtttcggcgaagtttggcaagtctggcgttttgttcggggagatgatttccgcttccacgcgctcgccataatgggcgaaaaaggcctcggttatggcctcgcaaacctgctcatgggtgatccccggcaacagctcggtgaggttggtcacgcgggaacgtacgctcgtaatgcctttcgccgccagtttctttttatccggattgagatagtttgccaggcggctgaggtcggcattgagtagcaaggtgccgtggtggaagccgcgatctttggtttcgcgataggcgctgccactgactttgcggtcgccttcgacggttttcaccaccagatcgttacgtccggacgcttcggcgctgacgccgagcgcgttcagcgcattgagcacaatgctcgtggagatagttttatcgtactccggcttgccagccataaaggtaaagcaggtattgccgagatcgtggaacaccgcgccgccaccgctactgcgccgcgccaggcggacgttatcttcttccatccgccgggtattacactctttccacgggttctgcgcgcgaccaattactaccgtgtcggcattgcgccagagaaacagaacgcgctgcgtggcgggcatttggcgaaaaatacactcttccaccgccaggttaaaccacgggtcgtaagagtcagagatgagcaggcgtaatgtggacataacgatttcctttcttgtagtaatgggtcactcttttttctcgctttcttcctcttccggcaccggtttgctggcggctaacaggaaggggctttgctgccagcgggtgcgtttaccctgtagcagcgtgcgggtcagcactacaccgattgccagactgagcagcaacatcaggcgtaaaatgttagtggtgttatccacctgttgggcttcggtggcgagcgtatgggtgtcgagtgtcaggcgcagatagccgagcggtccgtttttacccgcaattggctcgacaatctgctggttaaaatagccgcctgcttttttaccgtcgagcgccagccggtcgcgcacttcgacgctttcgccagaacgtgcgataagatcgccttgttcgtcatacacacccgcgtcgaggatacggctttcatccgttaactgatcgaggatcgcctgaatgcgtttttcatccggactgtcggtacgcatcagcggtgcaacgttcagcgtcacctgacgcgccagggtgcgggccagttcttccagctgtggattacgctgtcgctggtggttttgactaaaccaactcgctccctgcatcagcgccactaacaaggcaagacagaacaggacaatcactgcccgatgcagccggaatttcagttttgtgcgagccatcttccaccctttgaaaatttgagacttaatgttgccagaagcaatggatacaaggtagcctcatgcgttattttccctgcttcgaacgattttacaggagccttaatgcctaacattacctggtgcgacctgcctgaagatgtctctttatggccgggtctgcctcttagtttaagtggtgatgaagtgatgccactggattaccacgcaggtcgtagcggctggctgctgtatggtcgtgggctggataaacaacgtctgacccaataccagagcaaactgggtgcggcgatggtgattgttgccgcctggtgcgtggaagattatcaggtgattcgtctggcaggtagtctcaccgcacgggctacacgcctggcccacgaagcgcagctggatgtcgccccgctggggaaaatcccgcacctgcgcacgccgggtttgctggtgatggatatggactccaccgccatccagattgaatgtattgatgaaattgccaaactggccggaacgggcgagatggtggcggaagtaaccgaacgggcgatgcgcggcgaactcgattttaccgccagcctgcgcagccgtgtggcgacgctgaaaggcgctgacgccaatattctgcaacaggtgcgtgaaaatctgccgctgatgccaggcttaacgcaactggtgctcaagctggaaacgctgggctggaaagtggcgattgcctccggcggctttactttctttgctgaatacctgcgcgacaagctgcgcctgaccgccgtggtagccaatgaactggagatcatggacggtaaatttaccggcaatgtgatcggcgacatcgtagacgcgcagtacaaagcgaaaactctgactcgcctcgcgcaggagtatgaaatcccgctggcgcagaccgtggcgattggcgatggagccaatgacctgccgatgatcaaagcggcagggctggggattgcctaccatgccaagccaaaagtgaatgaaaaggcggaagtcaccatccgtcacgctgacctgatgggggtattctgcatcctcagtggcagcctgaatcagaagtaattgctcgcccgccatcctgcgggcggcacagcattaacgaggtacaccgtggcaaaagctccaaaacgcgcctttgtttgtaatgaatgcggggccgattatccgcgctggcaggggcagtgcagtgcctgtcatgcctggaacaccatcaccgaggtgcgtcttgctgcgagcccaatggtggcgcgtaacgagcgtctcagcggctatgccggtagcgccggggtggcaaaagtccagaaactctccgatatcagccttgaagagctgccgcgtttttccaccggatttaaagagttcgaccgcgtactaggcggcggcgtggtgccaggaagtgccattctgattggcggtaaccctggtgcggggaaatccacgctgctactgcaaacgctgtgcaaactggcccagcagatgaaaacgctgtatgtcaccggcgaagagagcctgcaacaggtggcaatgcgcgctcatcgccttggcctgccgactgacaatctcaatatgttgagcgaaaccagcatcgaacagatctgcctgattgccgaagaagagcaaccgaagctgatggtaattgacagcatccaggtgatgcatatggcggatgtacagagtagccctggtagcgtggcgcaggtgcgtgaaacggcggcttatttgacacgcttcgccaaaacgcgcggtgtggcgattgtcatggtggggcacgtaaccaaagatggtagcctggctggcccgaaagtgctggaacactgtatcgactgtagcgtgcttttggatggcgatgccgactcccgttttcgcaccttgcgcagccataaaaaccgcttcggcgcggtgaatgagctgggcgtcttcgcgatgaccgaacaggggctgcgtgaagtcagcaaccctagcgcaattttcttaagtcgcggcgatgaagtgacctccggtagcagtgtgatggtggtatgggaaggaacgcgtccactgctggtggagattcaggcgctggtcgatcacagcatgatggcgaacccacgccgcgtggcagtggggctggaacaaaaccgtctggcaatcctgctggctgtgttgcaccgtcacggtggtctgcaaatggccgatcaggatgtgtttgtgaacgtggtcggcggcgtgaaggtaaccgaaaccagtgccgacttagcgttactgctggcgatggtttccagcctgcgcgacagaccgctgccgcaggatctggtggtgtttggtgaagtcgggctggcaggggagatccgcccggtgcccagcggtcaggaacgaatctctgaagcggcgaaacacggttttcgccgggcgattgttccggcggctaacgtgccgaaaaaagcgccggaagggatgcagatttttggcgttaaaaaactctccgacgcgcttagcgtgttcgacgacttataatgagatatacggagggagatatgagcagttttgattacctgaaaactgccatcaagcaacagggctgcacgctacagcaggtagctgatgccagcggtatgaccaaagggtatttaagccagttactgaatgccaaaatcaaaagccccagcgcgcaaaagctggaggcgttgcaccgttttttggggcttgagtttccccggcagaagaaaacgatcggtgtcgtattcggtaagttctacccactgcataccggacatatctaccttatccagcgcgcctgtagccaggttgacgagctgcatatcattatgggttttgacgatacccgtgaccgcgcgttgttcgaagacagtgccatgagccagcagccgaccgtgccggatcgtctgcgttggttattgcaaacttttaaatatcagaaaaatattcgcattcatgctttcaacgaagagggcatggagccgtatccgcacggctgggatgtgtggagcaacggcatcaaaaagtttatggctgaaaaagggatccagccggatctgatctacaccagcgaagaagccgatgcgccacagtatatggaacatctggggatcgagacggtgctggtcgatccgaaacgtacctttatgagtatcagcggtgcgcagatccgcgaaaacccgttccgctactgggaatatattcctaccgaagtgaagccgttttttgtgcgtaccgtggcgatccttggcggcgagagcagcggtaaatccaccctggtaaacaaacttgccaatatcttcaacaccaccagtgcgtgggaatatggccgcgattatgtctttagtcacctcggcggtgatgagatcgcattgcagtattctgactacgataaaatcgcgctgggccacgctcaatacattgattttgcggtgaaatatgccaataaagtggcatttatcgataccgattttgtcaccactcaggcgttctgcaaaaagtacgaagggcgggaacatccgttcgtgcaggcgctgattgatgaataccgtttcgatctggtgatcctgctggagaacaacacgccgtgggtggcggatggtttacgcagcctcggcagtagcgtggatcgcaaagagttccagaacttgctggtggagatgctcgaagagaacaatatcgaatttgtgcgggttgaagaggaagattacgacagtcgtttcctgcgctgcgtggaactggtgcgggagatgatgggggagcagagataaccgtgatgaaactgctcaaaggcgaggtataaaatgagtttttttgatgagttgaaaacctctctggaagaggctgtcgagattaaacaaggtttgaaaaaacctgcacgggtgacccgccacgaaattgaggatgctaaggctgttgtagaccggaaacggtgttcacgccgcatccggcattcggtgctcaatgcctgatgcgacgcttaccgcgtcttatcaggcctacagttttacaacgtattgaaattgctggttttgtaggccggataaggcgttcgcgccgcatccggcattttacgcattacttcgcaatacgcttgtacttgatacgcttcggctccagcgcgtctgcgcccagcgtgcgtttcttgtactcttcgtactcggtaaagttaccttcgaagaactcaactttaccttcatcctggtaatccagaatgtgcgtggcgatacggtcgaggaaccaacggtcgtggctgataaccatcgcacagcccgggaactccagcagggcgttttccagcgcgcgcagggtttcgatatccaggtcgttggttggttcgtcgagcagcagcatgttgccgccaacctgcagcagcttcgccagatgcagacgaccgcgctcaccaccggagagttcaccaacgcgtttaccctgatcaacccctttaaagttaaagcggccaacgtaggcgcggcttggcatctcggtgttgccgatcttcatgatatccagcccgccggaaacttcttcccaaacggttttgctgttatccatactgtcacggaactgatcaacgctcgccagtttcaccgtttcacccaaagtgatggtgccgctgtccggctgttcctgaccagagatcatacggaacagggtgcttttacccgcaccgttcggaccgatgatcccgacgatcgctcctttcgggatgctgaagctcaggtcatcaatcagcagacgatcgccataggatttacgcaggttgctgacttccagcactttatcgcccagacgcggtccaggtggaataaacagttcgttggtttcgttacgtttctgatattcggtgctgttcagttcttcaaagcgcgccagacgtgctttacctttgctctgacggcctttagtaccttgacgtacccattccagctctttctcaatgctcttacgacgcgccgcttcttgactagcttcctgcgccaggcgctgatctttctgctccagccaggaggagtagttaccttcccacggaataccttcaccgcggtcaagttcgaggatccagcctgcaacgttatcgaggaagtaacggtcgtgggtaatcgccacaacggtgccttcgaagtcgtgcaggaagcgttccagccaggccacggattcggcatccaggtggttggtcggttcgtcgagcagcagcatgtctggtttttccagcagcaggcggcacaacgctacgcgacgacgttcaccaccggagaggttagcgattttcgcgtcccagtccggcagacgtagcgcatccgccgcacgctccagctgtacgttcagattatgaccgtcgtgagcctgaatgatctcttccagacggccttgttcagcggccagcttgtcaaaatcggcatccggatcggcgtacagcgcatacacttcatccaggcgtttcagggcgttaaccacttcactaaccgcttcttcaatggactcacgcacggtgtgttccgggttcagctgcggttcctgcggcagataaccaatcttgatgtctggctgcggacgcgcttcaccttcgatgtctttatcaatgcccgccataatgcgcagcagggtggacttacccgcgccattcagacccaggacaccaatttttgccccagggaagaaactcagagagatgtttttcaaaatatgacgtttcggcggaacaactttgccgacacgatgcatggtataaacgaattgagccacgttggacttcgcctctatgtttatcgtgataatgagttttcaaaggcgaagtgtagcctttttccccgcctaatcccagccggtcgatcaccctcgcagtaaaagtaaaaaagtgtccgtaacgtggcgtaaacggcaatgactggttagcataaatctattacgcggcatgacgctgcattgatgtatttacacttagaggatgcgcttgtggaaaaagccaaacaagttacctggcggctgttggctgccggtgtctgtctgctgacggtcagcagcgtggcgcgagccgacagtctggatgagcagcgtagtcgttacgcgcaaatcaagcaggcctgggataatcgacaaatggatgtggtcgaacaaatgatgcctggactgaaggattatccgctttatccctacctggaataccgccagatcaccgatgatctgatgaatcaaccggcggtgacggtcactaactttgttcgcgctaaccccacgcttcctcccgctcgcacgctgcaatctcgtttcgtcaatgaactggcgcggcgtgaagactggcgtggcttgttagcctttagcccggaaaagcccggaactaccgaagcgcaatgtaattactactatgcgaaatggaacaccgggcagagtgaagaagcctggcaaggggcgaaagagctgtggctaaccggcaagagccagcctaacgcctgtgacaagttatttagcgtctggcgtgcgagtggtaaacaagatccgctggcgtatttagagcgtatccgtctggcgatgaaagcgggtaacacaggcctggtaacagtgctggcagggcagatgcctgccgattaccagactatcgccagcgcaatcattagtctggcgaacaaccctaatacggtactgaccttcgcgcgtacaactggcgcgaccgattttacccgtcaaatggcggcggtggcgtttgccagtgtggcgcggcaggatgctgagaatgcacggctgatgatcccaagccttgcccaggcgcagcagcttaatgaagatcagattcaggagctgcgcgatatcgtcgcctggcgtttgatgggcaacgatgtcaccgacgagcaggcgaaatggcgcgatgacgccattatgcgcagccaatctactagccttattgaacgccgtgtacgaatggcgcttggcaccggcgatcgtcgcggcctgaatacctggctggcgcgtctgcctatggaagcgaaagagaaagatgaatggcgttactggcaggcggatttattgctggaacgcggacgtgaagctgaagcaaaagagattttgcatcaactcatgcaacagcgtggtttctacccgatggttgcagcacaacgcatcggcgaagagtatgagctgaagattgataaagcgccgcagaatgttgacagcgccctgactcaggggccggagatggcgcgcgtgcgcgagttgatgtactggaatctcgataataccgcgcgtagcgagtgggccaatctggtgaagagcaagagtaaaacagagcaggctcaactggcgcggtatgctttcaacaaccaatggtgggatcttagcgttcaggcaacgatcgccgggaagctgtgggatcatctggaagagcgattcccgctggcttacaacgatcttttcaagcgctacaccagcggtaaggagatcccgcaaagctatgcgatggcgattgctcgtcaggagagcgcctggaatccgaaagtgaaaagtccggtaggggccagcggcttgatgcagattatgcctggtacagcgacccatacggtgaagatgttctctattcccggttatagcagtcctgggcaattgctggatccggaaacgaatatcaacattggcaccagttacctgcaatatgtttatcagcagtttggcaataatcgtattttctccagtgcagcttataacgccggaccagggcgggtgcgaacctggcttggcaacagcgccgggcgtatcgacgcagtggcatttgtcgagagtattccattctccgagacgcgcggttatgtgaagaacgtgctggcttatgacgcttactaccgctatttcatgggggataaaccgacgttgatgagcgccacggaatggggacgtcgttactgatccgcacgtttatgatatgctatcgtactctttagcgagtacaaccgggggaggcattttgcttcccccgctaacaatggcgacatattatggcccaacaaagtccctatagtgcagcgatggcagaacagcgtcaccaggagtggttacgttttgtcgacctgcttaagaatgcctaccaaaacgatctccatttaccgttgttaaacctgatgctgacgccagatgagcgcgaagcgttggggactcgcgtgcgtattgtcgaagagctgttgcgcggcgaaatgagccagcgtgagttaaaaaatgaactcggcgcaggcatcgcgacgattacgcgtggatctaacagcctgaaagccgcgcccgtcgagctgcgccagtggctggaagaggtgttgctgaaaagcgattgattttgtaggcctgataagacgtggcgcatcaggcatcgtgcaccgaatgccggatgcggcgtgaacgccttatccgtcctacaaatacccgtaatttcaatatgtttggtaggcatgataagacgcggcagcgtcgcatcaggcgcttaatacacggcattatgaaacggactcagcgccaggatcaccgcctggtgatagacgctggcgcgagtgagtttcccggcggtaaacacgccgatcgccccttccttacgaccaatctcatcaataccggtataacggctcatcacgggaccaagcgcctcaccttcacgcactttttccagaatcaccgcaggcaacggcaaagtagcgctacgcgcctcgccgcgctggctggcgttttcaatcaccacccaactgaaagtgctgtcaccatcgatgccagcttcaatcgccacccaaaaatcagcctctggaagtaaacggcgggcattggctacccgatttcgtgcgccagcgcgcgtttcctcactgccaaagggctgttccggtacaccgctctcgacggcaacggatgcaatatggcaggatccttcgccgaagatctcgtgaaatgcctgcagaatggcctgaattttagcgggattggtggtcgcacagacaacttggtgcataatcagcattactcagaaaattaacgttacagcagtatacggaaaaaagcatgttacaggtatacctagtccgccacggtgaaacgcagtggaacgccgagcgacgtattcagggccagtctgacagcccgctgaccgccaaaggtgagcaacaggcgatgcaggtggcaacccgtgccaaagagcttggcattacgcatatcatcagtagcgatttaggacgcacccggcgtacggcggaaatcatcgcccaggcctgcggctgtgacatcatctttgattctcgcctgcgtgaattaaacatgggtgtgctggaaaaaagacatatcgattctctgaccgaagaagaagagaactggcgtcggcagctggtcaatggcaccgttgacgggcgtattcctgaaggcgagagtatgcaggagctcagcgatcgcgtcaatgcggcactggaatcttgccgggacttaccgcagggaagccgaccgctgctggtgagtcatggtattgcactgggatgcctggtgagtacgattctcggattaccagcatgggcagagcgccgcttacgtctgcgtaactgttctattagccgcgtggattatcaggaaagcctgtggctggcgtctggctgggtcgttgaaaccgcaggggacatcagccatctggacgcccctgcattagatgagctgcagcgttaacgacggatcggaatcagcagttcacagcgtagattaattgggcgatctcccgctttggcatcttctgccgggtagtatcgctcaatatcctgacctttacggcgcgtcaggttgagcattggcatgcacgttccgtataccgtcaggataaactcctgcacgccggttcccagaccttcataggtaaacatcacatattcgccgccctgcagcatcaccggatgccccgtcagtacatagccatctgcctgatcctgggctaacgcggtggtatagaatacctcttgctcgtcgtctttatcctgactcggacgcgtttcattcaggccgtagagcaccggcggaatggtcggcgcgttgccgagaaaatcgtgccagaactgataacgcatttcatggcggaaatcagagatttgctccaggctacaggagtagctctgggtaacaccaatcagcggcgtatcttccagggtgacaaatttgtgctctggcatagtgaattcacccaggcgtagcggcgggcgaataccaaaggcgctccattcaggagaacggcggtaaagtgcaggagtctgggcaaactgcttcttgaatgcgcgggtaaatgtctgttgagagtcgaagcggtattgcagcgcgatgtccagaatcggacgcgcagtcaggcgtagtgcgaccgcgcttttgctcaaacgacgagcacgaatatacgcgccaatagcatggccagtgacatctttaaacattctctgtaagtgccacttggaataacctgctttcgccgctacattgtcgaggctcaggggctgatccagatgaccttccagccagattaaaaggtcgcgaataatgccggcctgatccataaaatatcctcatcctttcaacaacgagcacctgacatcaggtaattggataatagcattttttgctgttttagcattcagtgtttttttcttagtagagtatgttttagggcttgacggaaataaaagtattgagattttgttcttaatcaatatgttatttaccgtgacgaactaattgctcgtgtaatagataaaaatggtaacaatatgaaatacaagcatttgatcctgtctttaagcctgataatgctggggccattggctcatgcagaagagattggtagcgtcgacaccgtatttaaaatgatcggcccggatcacaaaattgttgtggaagcctttgatgatcccgatgtgaaaaatgtcacctgttatgtgagccgggcgaaaaccggtggtattaaagggggattgggtctggcggaagatacctccgatgcggccatttcttgtcagcaagtcgggccgattgaactgagcgatcgtattaaaaacggcaaagctcagggcgaggtagtattcaaaaaacgcacgtccctggtctttaagagcttacaggtcgtgcgcttttatgatgccaaacgcaacgcgctcgcttatctggcttactccgacaaagttgtagaaggtagcccgaaaaacgcgattagcgcggttcctgtcatgccgtggcggcaataacagaggcgatttatgcaacgggaaacggtctggttagtggaagatgagcaagggatagccgacacgctggtctacatgttgcagcaggaaggttttgccgtcgaggtctttgagcgaggcttgccggtgctggataaagctcgcaagcaggtacccgacgtcatgattctcgatgttggtctgccggatattagcggctttgaattgtgccgccagttactggcgctccatccggcgttacctgtactgttcctgacggcccgaagtgaagaggtcgatcgcctgcttgggctggaaattggtgctgacgactacgtggctaaaccgtttagtccccgcgaagtgtgcgccagggtgcgcaccttactgcgtcgggtgaagaagttcagcacgccgtctcccgtcatccgtattggacattttgaattgaatgaacccgcggcgcagatcagctggtttgacacgccattagcgctgactcggtatgagtttttattgttgaagacgttactcaagagtccgggccgcgtctggtcccgccagcaactgatggatagcgtatgggaagatgcgcaggacacctacgatcgcaccgtcgatacccacattaaaacgctgcgtgccaagctgcgcgccatcaaccccgatcttagtccgattaatactcatcgcggcatgggatatagcctgaggggcctgtaatgcgtatcggcatgcggttgttgctgggctattttttactggtggcggtggcagcctggttcgtactggccatttttgtcaaagaagttaaaccgggcgtgcgaagagcaacggaggggacgttgatcgacaccgcaacgttgctggcggagctggcgcgtcccgatttgctctctggggacccaacgcatgggcaactggcgcaggcgtttaatcagctacaacatcgcccgtttcgcgccaatatcggtggcattaacaaagtgcgcaatgaatatcatgtctatatgaccgatgcgcagggcaaagtattgttcgatagcgcaaataaagccgttggacaggattatagccgctggaatgacgtctggctaacgttgcgtggtcagtatggtgcgcgcagcacgttgcaaaatcctgccgatcccgaaagttctgtgatgtatgttgccgcaccgattatggacggcagccggcttattggcgttttgagcgtaggcaaaccgaacgcggcgatggctccggtcattaagcgtagcgagcggcgaattttatgggccagcgccattttgttggggattgcactggtgattggcgcaggcatggtttggtggatcaaccgctctattgcccggctcactcgctatgctgattccgtcactgacaataagcccgttcctctccccgatctcggtagtagcgagttgcgtaaactcgcgcaggcgctggaaagtatgcgcgtgaagctggaagggaaaaactatattgagcagtatgtttacgcattaactcatgagctaaaaagcccactggcggcgattcgtggagcggcggaaattttacgcgaaggtccgccgccggaagtggtggctcgttttactgacaacattctgacgcaaaatgcgcgtatgcaggcattggtagaaacgttactacgccaggcaagactggagaatcgtcaggaagtcgttctgactgctgttgatgtggcggcattattccgccgcgtcagcgaagcgcgcaccgtgcagttggcagaaaaaaaaatcactctgcatgttacgcccaccgaggttaacgttgctgctgaaccggcgttactggagcaggcgctgggaaatttactggataacgccatcgattttacccccgagagcggttgcatcacgctaagcgccgaagtggatcaggaacacgtcacgcttaaggtgctggataccggtagtggtattcctgactacgcgcttagtcgtatttttgaacgcttttactctttgcctcgtgcaaatgggcaaaaaagcagcggtctggggttggcgttcgtcagtgaggtcgcccgtttgtttaacggcgaagtcacgctgcgcaacgtgcaggaaggtggcgtgctggccagccttcgacttcaccgtcacttcacataacttcaaattcttcccacatagtcttcgtatcctgctgccattgcaaaggagaagactatgttgaaatcccccctgttctggaaaatgactagcctgtttggtgcagtattgctgttgttgattccgataatgctgattcggcaggtgattgtcgaacgtgctgattaccgtagcgatgtggaagatgcgattcgccaaagtaccagcgggccgcaaaaactcgttgggccgctcatcgctattcctgtgaccgagctttatacggtgcaggaagaggataaaaccgtggagcggaaacgaagttttatccatttttggttacctgagagtttgatggttgatggcaatcagaacgtggaagaacgcaagatagggatttataccggtcaggtctggcacagtgatttaacgttaaaagccgatttcgatgttagccgtcttagcgaactcaacgcgccaaatatcaccttaggcaagccatttattgtgattagcgtcggggatgcgcgtggtattggtgtggtgaaagcgcctgaagttaacggaacggcgctgaccattgaacccggcaccgggttagagcaaggcgggcagggcgtgcatatccctttacctgaaggggactggcggaagcagaacctgaagctgaatatggccctgaatttaagcggtaccggcgatctttctgtggtgcctggcgggcgtaatagcgaaatgaccttaaccagcaactggccgcatcccagttttttaggtgattttctaccagccaaacgggaagttagcgagagtggttttcaggcgcactggcaaagcagctggtttgctaataatctcggtgagcgttttgctagtggcaatgataccggctgggaaaacttcccggcgtttagcgtcgcagtaacgacgccagccgatcaataccaattaactgaccgggcgactaagtacgccattctgctgattgcactgacttttatggcgttctttgtttttgaaacgctcaccgcgcaacgtttacacccaatgcaatatttgctggtggggcttagtttggtgatgttttatttgctcttgctggcgctttctgaacataccggttttaccgtggcatggataatcgccagtctgattggggcgataatgaacggtatttatttgcaagcggtattgaaaggttggtgcaacagcatgttgtttaccctcgcgctgttgttgctggatggtgtgatgtggggactgctcaactctgccgatagcgcgctgttgttgggaaccagtgtgctggtggtggcgctggccggcatgatgtttgtgacccgtaatatcgactggtatgcgtttagtctgccgaaaatgaaagccagtaaagaagttacaacggacgatgagttacgtatctggaaataaggttgaaaaataaaaacggcgctaaaaagcgccgttttttttgacggtggtaaagccgattaatcttccagatcaccgcagaagcgataaccttcaccgtgaatggtggcgatgatttccggcgtatccggcgtagattcgaaatgtttacgaatacggcggatcgtcacgtctacagtacggtcgtgcggtttcagctcacggccggtcattttcttcagcagttcagcacgggactgaattttgcctgggttttcacagaagtgaagcatggcgcggaactcgctgcgcggcagcttgtactgctcgccatcagggccgatcaagctacggctgttgatgtccagttcccaaccattgaacttgtagctttcaacgctacgacgttcttcgctgacagtacccagattcatggtacgggacagtaggttgcgtgcacgaatcgtcagttcacgcgggttgaacggtttggtgatgtagtcatctgcaccgatttcgaggccgagaattttatcgacttcgttgtcacggccagtcaggaacatcaacgcaacattcgcctgctcgcgcagttcacgcgctaacagaagaccgttcttacccggcagattgatatccatgatcaccaggttgatgtcatattcagagaggatctgatgcatttccgcgccatctgtcgcttcgaaaacatcatagccttccgcttcgaaaatacttttcaacgtgttgcgtgttaccaactcgtcttcaacgataagaatgtgcggggtctgcatgtttgctacctaaattgccaactaaatcgaaacaggaagtacaaaagtccctgacctgcctgatgcatgctgcaaattaacatgatcggcgtaacatgactaaagtacgtaattgcgttcttgatgcactttccatcaacgtcaacaacatcattagcttggtcgtgggtactttccctcaggacccgacagtgagtaaaacggctgtcatcctaaccattttaacagcaacataacaggctaagaggggccggacacccaataaaactacgcttcgttgacatatatcaagttcaattgtagcacgttaacagtttgatgaaatcatcgtatctaaatgctagctttcgtcacattattttaataatccaactagttgcatcatacaactaataaacgtggtgaatccaattgtcgagatttattttttataaaattatcctaagtaaacagaaggatatgtagcattttttaacaactcaaccgttagtacagtcaggaaatagtttagccttttttaagctaagtaaagggctttttctgcgacttacgttaagaatttgtaaattcgcaccgcgtaataagttgacagtgatcacccggttcgcggttatttgatcaagaagagtggcaatatgcgtataacgattattctggtcgcacccgccagagcagaaaatattggggcagcggcgcgggcaatgaaaacgatggggtttagcgatctgcggattgtcgatagtcaggcacacctggagccagccacccgctgggtcgcacatggatctggtgatattattgataatattaaagttttcccgacattggctgaaagcttacacgatgtcgatttcactgtcgccaccactgcgcgcagtcgggcgaaatatcattactacgccacgccagttgaactggtgccgctgttagaggaaaaatctagttggatgagccatgccgcgctggtgtttggtcgcgaagattccgggttgactaacgaagagttagcgttggctgacgttcttactggtgtgccgatggtggcggattatcctagcctcaatctggggcaggcggtgatggtctattgctatcaattagcaacattaatacaacaaccggcgaaaagtgatgcaacggcagaccaacatcaactgcaagctttacgcgaacgagccatgacattgctgacgactctggcagtggcagatgacataaaactggtcgactggttacaacaacgcctggggcttttagagcaacgagacacggcaatgttgcaccgtttgctgcatgatattgaaaaaaatatcaccaaataaaaaacgccttagtaagtatttttc
